(19) United States
(12) Patent Application Publication
(10) Pub. No.: US 2018/0078617 A1
(43) Pub. Date: Mar. 22, 2018

(54) ANTI-CELL PROLIFERATIVE COMPOUNDS AND METHODS OF USE

(71) Applicant: KALOS Therapeutics, San Diego, CA (US)

(72) Inventor: MICHAEL KOZLOWSKI, San Diego, CA (US)

(73) Assignee: KALOS Therapeutics, San Diego, CA (US)

(21) Appl. No.: 15/804,881

(22) Filed: Nov. 6, 2017

Related U.S. Application Data
(63) Continuation of application No. 12/345,023, filed on Dec. 29, 2008, now Pat. No. 9,808,512.
(60) Provisional application No. 61/009,382, filed on Dec. 28, 2007.

(51) Int. Cl. A61K 38/22

(52) U.S. Cl. CPC A61K 38/2242

(57) ABSTRACT

The invention provides compounds such as proteins, peptides, peptidomimetics and small molecules, methods for treating cell proliferative disorders such as neoplasia, tumor, or cancer, and metastasis thereof, and methods for identifying and screening for active compounds.

### RELATED APPLICATION

[0001] This application is a continuation application of application Ser. No. 12/345,023, filed Dec. 29, 2008, which claims the benefit of priority to provisional application No. 61/009,382, filed Dec. 28, 2007, all of which applications are expressly incorporated herein by reference in their entirety.

### SEQUENCE LISTING

[0002] The instant application contains a Sequence Listing which has been submitted electronically in ASCII format and is hereby incorporated by reference in its entirety. Said ASCII copy, created on Oct. 11, 2017, is named “Oct2017KalosCont0454815_ST25.txt” and is 572,344 bytes in size.

### FIELD OF THE INVENTION

[0003] The invention relates to conserved anti-cell proliferative (e.g., anticancer) motifs in proteins, peptides, and peptidomimetics, and methods for treating cancer and medicaments using the described motif.

### INTRODUCTION

[0004] It has long been observed that naturally occurring peptides, certain medicines, and natural substances have more than one observed activity. For example, many medicines have side effects, which can appear entirely unrelated and sometimes deleterious to the primary intended effect of drug. However, not all such side effects are deleterious to the health of a patient being dosed with such drugs.

[0005] In certain instances, the side effect may be so useful as to provide entirely new applications to the drug or naturally occurring substance. Examples of these include finasteride (Propecia), used as a treatment in benign prostatic hyperplasia (BPH) and prostate cancer in higher doses, which is registered in many countries for male-pattern baldness. Another example is sildenafil citrate (Viagra), now famous in the marketplace for its side effect, rather than the originally intended application thereof.

[0006] In some cases, observations of an effect of naturally occurring substance indicates a possibility that such substances may have some new utility, but the primary observed effect of that substance may overwhelm any observed “new activity” in vivo. As a result such observations remain in vitro, or ex vivo curiosities, since the desired new activity effect is merely a side effect of the active substance.

[0007] One example of such an observation is the finding that the Natriuretic Peptides (NPs), which include ANP, BNP, CNP, and urodilatin, in humans, have many biological activities in addition to their primary, cardiovascular effects (e.g. the regulation of blood volume, blood pressure, and cardiac function), which include metabolic effects (e.g. control of fat metabolism) and cell growth modulating (e.g. antiproliferative) effects [Potter, et al. Endocrine Rev. 27:47 (2006) and references therein; Vesely, D. L., Curr Heart Fail Rep. 4(3):147 (2007).

[0008] Recently, it has been demonstrated that certain NPs also have the ability to kill cancer cells or to attenuate their growth both in culture and in animal models of human cancer [Baldini, et al, Cell Death Diff., 11:S210-S212 (2004); Baldini, et al, Melanoma Res. 16:501-507 (2006); Lelievre, et al., J. Biol. Chem, 276(47):43668, (2001); Levin, et al., Am. J. Physiol. 30:R453-R457 (1991); Vesely, D. L., Eur J Clin Invest 38(8):562 (2008).

[0009] While each of these effect may beneficial in their own right, sorting the milieu of effects from the NPs may hinder development of a safe and effective therapy for any one specific area targeted for treatment. For example, a large change in blood pressure accompanying dosing of an antiproliferative may frustrate the exercise of treating the patient at all, by creating one serous complication while treating another problem. As a result it is essential to sort out the structure, motif or action which is responsible for one function and separate it from others if possible.

[0010] Investigators have noted that NP's share common structural features which are thought to contribute to both their receptor binding characteristics and biological activities [He, X-L. et al, Science 293:1657 (2001); Moffatt, et al, J. Biol. Chem. 282(50):36454 (2007); Potter et al. Endocrine Rev. 27:47 (2006)]. These include a ring structure and a shared amino acid sequence, or motif. Different versions of this motif which have been proposed include CFGXXXDRIXXXXGLGC [Potter, et al., Endocrine Rev. 27:47 (2006)] and CFGXXXDRIXXXXGLGCS [He, et al, Science 293:1657 (2001)]. In each case, the two C residues are connected by a disulfide bridge. An NP motif consisting of FGXX(L/M)DRI(G/S) has also been proposed [Moffatt, et al, J. Biol. Chem. 282(50):36454 (2007)]. This motif is also found in other endogenous peptides, such as osteocrine and musclin (with replacement of the I residue with an L residue in the latter case), which share some of the metabolic and cell growth modulating effects of the NP's but lack their cardiovascular effects [Moffatt, et al, J. Biol. Chem. 282(50):36454 (2007); Nishizawa, H., et al., J. Biol. Chem. 279:19391 (2004); Potter, et al., Endocrine Rev. 27:47 (2006) and references therein]. This motif has been termed the Natriuretic Peptide Motif (NM) [Moffatt, et al., J. Biol. Chem. 282(50):36454 (2007)]. The ring structure of NP's appears necessary for binding to NPRA and NPRB, and for cardiovascular activity [Collinson, P. O., Bus. Brief. Eur. Cardiol, 66 (2005) and references therein; Potter, et al. Endocrine Rev. 27:47 (2006)], and the R14 residue (numbered according to ANP), which is an element of all proposed motifs, is believed to be necessary for binding to NPRC [He, et al, Science 293:1657 (2001); Lanctot, et al, Patent US2007/0049251 A1; Moffatt, et al, J. Biol. Chem. 282(50):36454 (2007)].

[0011] It would be beneficial to define a specific motif, which would reliably predict anticancer efficacy, and provide a therapy for treatment. Such a motif would provide not only a peptide, but peptidomemetics, and small molecules which would be useful as medicaments.

[0012] In the case of the NPs, three specific types of NP receptors (NPR) are believed to mediate the actions of NPs. The A-type receptor (NPRA) and the B-type receptor (NPRB) are thought to be involved in NP signaling since they have integral guanylyl cyclase domains [Potter, et al., Endocrine Rev. 27:47 (2006) and references therein]. The C-type receptor (NPRC), which has no guanylyl cyclase domain, is thought to be primarily a clearance receptor (i.e. deactivating NP's by reuptake) but it has also been suggested that it is linked to several intracellular signaling pathways [Gower, et al., Mol. Cell Biochem, 293:103 (2006); Hashim et al. Am. J. Heart Cir. Physiol, 291:H3144-H3153 (2006); Lelievre, et al., J. Biol. Chem, 276(47):43668 (2001); Panayiotou et al. Proc. Brit. Pharm. Soc, 41:abs 009P (2005); Prins, et al, J. Bio. Chem. 271:14156 (1996); Segawa, et al., Naun.-Schmeid. Arch. Pharmacol. 357:70 (1998)].

[0013] Each of the NPs appear to interact with these NP receptors, though their affinities each differ for NPRA, NPRB and NPRC. It has been speculated that the relative anticancer potencies of NP's are related to their binding affinities at NPRs [Vesely, D. L., Eur J Clin Invest 38(8):562 (2008) and references therein].

[0014] The prior art failed to recognize the role of NPRC in prediction of anticancer activity. In fact, though the art did observe that anticancer potency observed for ANP is greater than CNP [Vesely, D. L. Eur J Clin Invest 38(8):562 (2008), and references therein], in agreement with their activities at NPRC, the role of NPRC was clearly not recognized since NP related peptides (VDL, LANP, KP) were rationalized as not acting at NPRC, but at non-NP receptors [Vesely, D. L. et al., Peptides 11:193 (1991)].

[0015] Possibly because the investigators linking NPRC activation and cancer have disparate areas of expertise, the relationship of how these observations relate to the treatment of cancer has not yet been clearly understood or appreciated. Had any predictive value been assigned by the prior art, it is possible that drugs related to any such prediction would have been tested.

[0016] In fact, antiproliferative effects have been surprisingly found in NP analogs and peptidomimetics modeled after them that tend to exhibit NPRC-specific activity. Other known molecules [Baldini, et al, Cell Death Diff., 11:S210-S212 (2004); Baldini, et al, Melanoma Res. 16:501 (2006); Gower, et al., Mol. Cell Biochem, 293:103 (2006); Lelievre, et al., J. Biol. Chem, 276(47):43668 (2001); Levin E. R. and Frank, H. J. L., Am. J. Physiol. 30:R453-R457 (1991)] correlate well with this discovery. Moreover, NPRC stimulation modulates the MAP kinase (MAPK) pathway [Hashim, S., Li, Y, Anand-Srivastava, M. B., Am. J. Heart Cir. Physiol, 291:H3144-H3153 (2006); Lelievre, et al., J. Biol. Chem, 276(47):43668 (2001)]. Other types of MAPK inhibitors have been found to possess anticancer activity [Dhillon, et al., Oncogen 26:3279 (2007) and references therein].

[0017] Without resorting to mechanistic rationales for why this might be the case, the inventor has discovered that the NPRC related interactions with the motif described herein may influence or modulate the MAPK pathway which may have an effect on hyperproliferative diseases [Hashim, S., Li, Y, Anand-Srivastava, M. B., Am. J. Heart Cir. Physiol, 291:H3144-H3153 (2006); Lelievre, et al., J. Biol. Chem, 276(47):43668 (2001)]. This invention shows the involvement of NPRC in the anticancer effects of NPs, analogues and other unrelated peptides fitting the anticancer motif. The antiproliferative effects of NPs observed in both normal and cancer cells can also be produced by NPRC-selective NP analogs and peptidomimetics [Baldini, et al, Cell Death Diff., 11:S210-S212 (2004); Baldini, et al, Melanoma Res. 16:501 (2006); Gower, et al., Mol. Cell Biochem, 293:103 (2006); Lelievre, et al., J. Biol. Chem, 276(47):43668 (2001); Levin E. R. and Frank, H. J. L., Am. J. Physiol. 30:R453-R457 (1991)].

### SUMMARY

[0018] The invention provides compounds having anti-cell proliferative activity, which share a conserved motif, which can be referred to as an “anticancer motif” which is predictive of anti-cell proliferative (e.g., anti-cancer, -neoplastic or -tumor) activity. Such compounds can optionally bind to NPRC, or optionally modulate NPRC activity. Invention compounds that contain the conserved motif but lack other structural elements of NPs or NPRC may be selective for treating cell proliferative disorders (e.g., cancer, neoplasia or tumors) and reduce one or more side effects caused by other structural elements, such as the occurrence of cardiovascular or other side effects mediated by other NPs or NPRs.

### BRIEF DESCRIPTION OF THE DRAWINGS

[0019] FIG. 1 is a bar chart showing antitumor activity of peptides: arg-15-cys, Pro-15-Val, Ala-8-Leu, VDL and C-ANP4-23.

[0020] FIG. 2 is a graph showing antitumor activity of peptides: arg-15-cys, Pro-15-Val, Ala-8-Leu, VDL and C-ANP 4-23.

### DETAILED DESCRIPTION

[0021] Disclosed herein is a conserved motif that predicts anti-cell proliferative activity (“Anticancer Motif”). The invention therefore provides compounds with the conserved motif having anti-cell proliferative activity, as well as methods of using such compounds including, for example, methods for treating a cell proliferative disorder, methods of diagnosing a subject having increased probability of responding to treatment with such compounds, and methods of identifying (screening) for compounds having anti-cell proliferative activity. Furthermore, as disclosed herein the generic conserved motif structure and species within the generic conserved motif predicts structures of NP's, NP analogs, NP-related peptides, and small molecule NP mimetics, as well as additional compounds having anti-cell proliferative activity.

[0022] In various embodiments, a compound having anti-cell proliferative activity includes a conserved motif, namely, an eight residue compound, denoted

(Res1)-(Res 2)-(Res 3)-(Res 4)-(Res 5)-(Res 6)-(Res 7)-(Res 8) [Formula I],

wherein each of the residues are contiguous and are bonded (covalently or non-covalently) to their respective adjacent residue. The backbone of the conserved motif can be a linear or cyclic chain, such as a peptide or peptidomimetic chain, typically an amino acid sequence, which may be comprised of one or more naturally occurring amino acids or non-naturally amino acids (including d- or l-amino acids, alpha, beta or gamma amino acid, etc.). Appended to the conserved motif can be additional residues adjacent to any of the eight residues. Appended to the backbone can be side chains as set forth herein. Thus, (Res1)-(Res 2)-(Res 3)-(Res 4)-(Res 5)-(Res 6)-(Res 7)-(Res 8) can have additional residues (e.g., amino acids) adjacent to any of the residues of the conserved motif, as well as side chains appended to the backbone.

[0023] Deletion of a terminal residue does not completely attenuate activity, but rather decreases it significantly. For example, deletion of Res' and Res8 of Formula 1 (both termini) is expected to decrease the activity proportionately more, without obliterating it altogether. Thus, a conserved motif also includes compounds, peptides and proteins containing the following anticancer conserved motif:

(Res 2)-(Res 3)-(Res 4)-(Res 5)-(Res 6)-(Res 7) [Formula 2];

(Res 2)-(Res 3)-(Res 4)-(Res 5)-(Res 6)-(Res 7)-(Res 8) [Formula 3; and

(Res1)-(Res 2)-(Res 3)-(Res 4)-(Res 5)-(Res 6)-(Res 7) [Formula 4].

[0024] Each of the residues (Res), referred to herein (as Res 1, Res 2, Res 3, Res 4, Res 5, Res 6, Res 7 and Res 8, respectively) are further defined hereinbelow, with increasing specificity. As will be evident, certain positions of the conserved motif allow for significant variation in structure, whereas others require that they are more particularly defined.

[0025] Res 1—is an amino acid or mimetic thereof, wherein the backbone is selected from an ether, ester, ketone, alkyl, alkylene or amide linker of 5 or less atoms, having a side chain selected from hydrophobic, non-polar, and non-ionizable side chain, selected from benzyl, alkyl, alkylene, alkenyl, alkylaryl of less than 12 carbons;

[0026] Res 2—is an amino acid or mimetic thereof, wherein the backbone is selected from an ether, ester, ketone, alkyl, alkylene or amide linker of 5 or less atoms, having a side chain which is an amphiphilic side chain, hydrophilic side chain, a zwitterion, Glycine (G), Lysine (K), Arginine (R), glutamine (Q), and Asparagine (N);

[0027] Res 3—is an amino acid or mimetic thereof, wherein the backbone is selected from an ether, ester, ketone, alkyl, alkylene or amide linker of 5 or less atoms, having a side chain less than 5 members long, except that any ring may be 5 or 6 members in size, and Glycine (G), Histidine (H) Asparagine (N), Serine (S), Leucine (L), or Alanine (A);

[0028] Res 4—is a linker of 5 or less atoms or an amino acid, an ether, ester, ketone, alkyl, alkylene, amide linker, with a side chain comprising from 1 to about 12 carbons and with constituents thereon selected from amino, hydroxyl, amido, carboxy, aryl, heteroaryl and any naturally occurring amino acid;

[0029] Res 5—is an amino acid or mimetic thereof, wherein the backbone is selected from an ether, ester, ketone, alkyl, alkylene or amide linker of 5 or less atoms, having a side chain selected from a hydrophobic, non-polar, non-ionizable, aliphatic, side chain, and Leucine (L), Isoleucine (I), Valine (V), Alanine (A), or Methionine (M);

[0030] Res 6—is an amino acid or mimetic thereof, wherein the backbone is selected from an ether, ester, ketone, alkyl, alkylene or amide linker 5 or less atoms, having a polar side chain, or amino acids Serine (S), Aspartic Acid (D), Arginine (R), and Glutamic Acid (E);

[0031] Res 7—is an amino acid or mimetic thereof, wherein the backbone is selected from an ether, ester, ketone, alkyl, alkylene or amide linker 5 or less atoms, with a side chain comprising from 1 to about 12 carbons and with constituents thereon selected from amino, hydroxyl, amido, carboxy, aryl, heteroaryl and any naturally occurring amino acid;

[0032] Res 8—is an amino acid or mimetic thereof, wherein the backbone is selected from an ether, ester, ketone, alkyl, alkylene or amide linker of 5 or less atoms, having a hydrophobic, non-polar, and non-ionizable side chain, and amino acids Alanine (A), Leucine (L), Isoleucine (I), Valine (V), having a side chain selected from C1 to C12 alkyl, alkylene, and alkenyl.

[0033] The conserved motif, as defined herein comprises a “backbone,” and one or more “side chains” appended to the backbone. The term “backbone,” by way of illustration, is a peptide made up of naturally occurring amino acids with a polyamide backbone made up of alpha amino acids. In nature these tend to be L-alpha-amino acids. Conserved motifs, and residues appended thereto can include one or more D-amino acids, and non(un)-natural amino acids, and these D-analogues, as well as any non(un)-natural amino acid's backbones are included within the definition of backbone. In addition, beta-amino acids, or gamma, delta or epsilon analogues, are also included in the backbone definition. As the motif includes peptidomimetics, other moieties to mimic the polyamide backbone, such mimetics can impart improved biological stability and greater half-life in a biological system (e.g., a subject), for example, due, for example, to increased resistance to enzymatic degradation, increased circulation half life, increased bioavailability, increased efficacy, prolonged duration of effect, etc. When referring to peptidomimetics at one more of the residues, a “backbone” includes, for example, an ether, ester, ketone, alkyl, alkylene or amide linker, preferably of 5 or less atoms, with a “side chain” appended thereto.

[0034] The term “side chain” by way of illustration, in a naturally occurring peptide is made up of radical attached to the L-polyamide backbone, the 20 “side chains” referred to in the literature are widely known. In addition, less common side chains do occur in nature, some of which are derivatives of natural side chains—these are included in the definition of “side chain.” Whether the side chain is attached to the backbone in an L- or D-configuration, or whether they are in a specific position in an alpha, beta, gamma, delta, or epsilon amino acid is irrelevant since all are included in the definition of side chain. The term side chain includes the panoply of functionality embodied in naturally occurring amino acids and variations thereof, hence sufhydryl, sulphone, carboxy, animo, amido, hydroxyl, alkyl, alkylaryl (or heteroaryl), aryl or heteroaryl radicals are all included in this definition. For example, exemplary hydrophobic side chains include, but are not limited to benzyl, alkyl, alkylene, alkenyl, alkylaryl of less than 12 carbons. The skilled artisan, in view of the specification understands the breadth and variety as to the term “side chain”. As it relates to peptidomimetics, the backbone, has appended thereto 1-3 radicals, as defined above as side chains. Typically, up to 2 and more typically one side chain exists per residue (e.g., Res 1, Res, 2, . . . etc.)

[0035] For purposes of illustrating the conserved motif, oligopeptides using known amino acids, are exemplified not to limit the invention, but to illustrate the motif. For example, an oligopeptide, comprising about eight amino acids, forms a conserved anti-cell proliferative (anti-cancer, -neoplastic or -tumor) motif. Such motifs may exhibit increased anti-cell proliferative activity by increased length (e.g., 9, 10, 11, 12, 13, 14, 15, 16, 17, 8, 19, 20, etc., or more residues). Of course, peptidomimetics, including unnatural amino acids, derivatives and analogues at one or more positions of the sequence, whether within or outside of the conserved motif, are included.

[0036] Thus, the invention provides compounds having anti-cell proliferative activity having a conserved motif. In particular embodiments, motif denoted as (Res1)-(Res 2)-(Res 3)-(Res 4)-(Res 5)-(Res 6)-(Res 7)-(Res 8), is defined as:

[0037] Res 1—a hydrophobic, non-polar, and non-ionizable side chain, illustrated by amino acids including Phenylalanine (F), Alanine (A), Leucine (L), Isoleucine (I), Valine (V). Exemplary side chains include alkyl, alkylene, alkenyl, alkylaryl, and the like, typically of less than 12 carbons, more typically C1-05 alkyl, or C1-C3 alkyl with an aryl substituent thereon.

[0038] Res 2—is an amphiphilic or hydrophilic side chain, which may include a zwitterion, illustrated by amino acids including Glycine (G), Lysine (K), Arginine (R), glutamine (Q), Asparagine (N).

[0039] Res 3 is a amino acid side chain which is small in size, typically a chain less than 5 members long, except that any ring may be 5 or 6 members in size, and more preferably C1 to C3 in length if alkyl, more preferably C0-C2, illustrated by amino acids including Glycine (G), Histidine (H) Asparagine (N), Serine (S), Leucine (L), Alanine (A).

[0040] Res 4—is a linker of about the size of an amino acid, with a side chain which may vary C1-C12, and have any constituent, as represented by the diversity found in the 20 naturally occurring amino acids. As a result an ether, ester, ketone, alkyl, alkylene or amide linker, with substituents thereon, of any similar size to an amino acid may be suitable.

[0041] Res 5—is a hydrophobic, non-polar, non-ionizable, aliphatic, side chain, as illustrated by amino acids including Leucine (L), Isoleucine (I), Valine (V), Alanine (A), or Methionine (M).

[0042] Res 6—is a polar side chain, illustrated by amino acids Serine (S), Aspartic Acid (D), Arginine (R), and Glutamic Acid (E).

[0043] Res 7—is a linker of about the size of an amino acid, with a side chain which may vary C1-C12, and have any constituent, as represented by the diversity found in the 20 naturally occurring amino acids. As a result an ether, ester, ketone, alkyl, alkylene or amide linker, with substituents thereon, of any similar size to an amino acid may be suitable.

[0044] Res 8—is a hydrophobic, non-polar, and non-ionizable side chain, illustrated by amino acids including, Alanine (A), Leucine (L), Isoleucine (I), Valine (V). Exemplary side chains will be alkyl, alkylene, alkenyl, and the like, typically of less than 12 carbons, more typically C1-C5 alkyl, or C1-C3 alkyl with an aryl substituent thereon.

[0045] Suitable side chains may be selected based on size, polarity, acidity or basicity, and hydrophobicity using the known structures, and known parameters such as those selected and illustrated below:

| | | | | | | | Aromatic | van der |
|---|---|---|---|---|---|---|---|---|
| AA1 | | | | | | | or | Waals |
| letter | Side chain | Hydrophobic | pKa | Polar | pI | pH | Aliphatic | volume |
| A | —CH₃ | X | — | — | 6.01 | — | — | 67 |
| C | —CH₂SH | X | 8.18 | — | 5.05 | acidic | — | 86 |
| D | —CH₂COOH | — | 3.90 | X | 2.85 | acidic | — | 91 |
| E | —CH₂CH₂COOH | — | 4.07 | X | 3.15 | acidic | — | 109 |
| F | —CH₂C₆H₅ | X | — | — | 5.49 | — | Aromatic | 135 |
| G | —H | — | — | — | 6.06 | — | — | 48 |
| H | —CH₂—C₃H₃N₂ | — | 6.04 | X | 7.60 | weak | Aromatic | 118 |
| | | | | | | basic | | |
| I | —CH(CH₃)CH₂CH₃ | X | — | — | 6.05 | — | Aliphatic | 124 |
| K | —(CH₂)₄NH₂ | — | 10.54 | X | 9.60 | basic | — | 135 |
| L | —CH₂CH(CH₃)₂ | X | — | — | 6.01 | — | Aliphatic | 124 |
| M | —CH₂CH₂SCH₃ | X | — | — | 5.74 | — | — | 124 |
| N | —CH₂CONH₂ | — | — | X | 5.41 | — | — | 96 |
| P | —CH₂CH₂CH₂— | X | — | — | 6.30 | — | — | 90 |
| Q | —CH₂CH₂CONH₂ | — | — | X | 5.65 | — | — | 114 |
| R | —(CH₂)₃NH—C(NH)NH₂ | — | 12.48 | X | 10.76 | strongly | — | 148 |
| | | | | | | basic | | |
| S | —CH₂OH | — | — | X | 5.68 | — | — | 73 |
| T | —CH(OH)CH₃ | — | — | X | 5.60 | weak | — | 93 |
| | | | | | | acidic | | |
| U | —CH₂SeH | X | 5.73 | — | — | — | | |
| V | —CH(CH₃)₂ | X | — | — | 6.00 | — | Aliphatic | 105 |
| W | —CH₂C₈H₆N | X | — | — | 5.89 | — | Aromatic | 163 |
| Y | —CH₂—C₆H₄OH | — | 10.46 | X | 5.64 | — | Aromatic | 141 |

[0046] In addition, the substitution of one or more amino acids, alterations of the backbone for stability, derivatives, peptidomimetics and other alterations as described herein are also contemplated.

[0047] As disclosed herein, invention compounds that include a conserved motif can include additional residues (e.g., amino acids or mimetics thereof) adjacent to any of the residues of the conserved motif (e.g., any one of (Res1)-(Res 2)-(Res 3)-(Res 4)-(Res 5)-(Res 6)-(Res 7)-(Res 8)). Typically, the number of residues in an invention compound will total less than about 50 residues (e.g., amino acids or mimetics thereof), inclusive of the conserved motif. In various particular embodiments, the number of residues comprise from about 8 up to about 45 residues (e.g., amino acids or mimetics thereof). In additional embodiments, the number of residues comprise from about 8 up to about 30 residues (e.g., amino acids or mimetics thereof). In further embodiments, the number of residues comprise from about 8 up to about 25 residues (e.g., amino acids or mimetics thereof). In yet additional embodiments, the number of residues comprise from about 8 up to about 20 residues (e.g., amino acids or mimetics thereof), or between about 10 to 25, 10 to 20, or 10 to 16 residues (e.g., amino acids or mimetics thereof) in length.

[0048] While not intending to be bound by any particular theory or mechanism, the inventor has found that binding to the NPRC receptor can be predictive of anti-cell proliferative (e.g., anticancer) activity. Thus, although species having the conserved motif may be incapable of binding the NPRC receptor, typically those having the conserved motif are capable of binding the NPRC receptor, optionally selectively, and more typically are capable of binding the NPRC receptor with an equilibrium receptor binding affinity to the NPRC receptor, determined by the Ki value, in at least the micromolar range

[0049] Furthermore, it appears that the conserved motif does not require the C residues required for a ring structure, nor the R14 residue that has been deemed critical for activity in all previously identified motifs.

[0050] The conserved motif is shared by ANP, CNP, the ANP-related peptides LANP, KP, VDL and the ANP analog, cANF, all of which have anticancer activity. CNP, which is less active than ANP, LANP, KP or VDL has a slightly larger amino acid side chain on one of the residues of the motif (L instead of G, A, N or S). BNP, which is inactive, has an even larger side chain at this position (K), and one which differs in electronic characteristics. Small molecule ANP mimetics, which also bind to NPRC, also have structures which are explainable based on the motif. For example, elimination of the equivalent of the R14 residue in one these molecules did not eliminate activity (Veale). Since the conserved anti-cell proliferative motif is significantly different from the previously described NP motifs, and NP motifs are believed to underlie the cardiovascular effects of these peptides, compounds that contain the anti-cell proliferative motif without the NP motif(s) are predicted to have anti-cell proliferative activity with fewer if any cardiovascular side effects of native peptides or proteins and are therefore included.

[0051] The conserved motif “residues” (i.e., amino acids or mimetics thereof) as well as their subunits, in this invention can be a) naturally or non-naturally occurring, b) produced by chemical synthesis, c) produced by recombinant DNA technology, d) produced by, chemical, biochemical or enzymatic fragmentation of larger molecules, e) produced by methods resulting from a combination of methods a through d listed above, or f) produced by any other means for producing peptides or amino acid sequences. By employing chemical synthesis, it is possible to introduce various amino acids which do not naturally occur into the construct, modify the N- or C-terminus, and the like, thereby providing improved stability (on the shelf or in vivo) and formulation, resistance to protease degradation, etc., and to introduce one or more amino acid surrogates into the construct.

[0052] The term “peptide” as used herein includes any structure comprised of two or more amino acids, including chemical modifications and derivatives of amino acids, covalently linked. The amino acids forming all or a part of a peptide may be naturally occurring amino acids, stereoisomers and modifications of such amino acids, non-protein amino acids, post-translationally modified amino acids (e.g., by glycosylation, ester or amide cleavage, etc.), enzymatically modified amino acids, amino acids with their side chain moiety either modified, derivatized from naturally occurring moieties, or are entirely synthetic, or not naturally occurring. The term “peptide” also includes dimers or multimers of peptides. A “manufactured” peptide includes a peptide produced by chemical synthesis, recombinant DNA technology, biochemical or enzymatic fragmentation of larger molecules, combinations of the foregoing or, in general, made by any other method involving manipulation by the hand of man.

[0053] The term “amino acid side chain moiety” as used herein includes any side chain of any amino acid, as the term “amino acid” is defined herein. This therefore includes the side chain moiety present in naturally occurring amino acids. It further includes side chain moieties in modified naturally occurring amino acids, such as side chain moieties in stereoisomers and modifications of naturally occurring protein amino acids, non-protein amino acids, post-translationally modified amino acids, enzymatically synthesized amino acids, derivatized amino acids, constructs or structures designed to mimic amino acids, etc. For example, the side chain moiety of any amino acid disclosed herein or known to one of skill in the art is included within the definition. A “derivative of an amino acid side chain moiety” is included within the definition of an amino acid side chain moiety.

[0054] The skilled artisan will recognize that amino acid side chain moieties can be derivatized, including a modification to or variation in either a naturally occurring or unnatural amino acid side chain moiety, wherein the modification or variation includes, for example, but is not limited to: (a) adding one or more saturated or unsaturated carbon atoms to an existing alkyl, aryl, or aralkyl chain; (b) substituting a carbon in the side chain with another atom, preferably oxygen or nitrogen; (c) adding a terminal group to a carbon atom of the side chain, including methyl (—CH3), methoxy (—OCH3), nitro (—NO2), hydroxyl (—OH), or cyano (—C═N); (d) for side chain moieties including a hydroxy, thiol or amino groups, adding a suitable hydroxy, thiol or amino protecting group; or (e) for side chain moieties including a ring structure, adding one or ring substituents, including hydroxyl, halogen, alkyl, or aryl groups attached directly or through an ether linkage. For amino groups, suitable protecting groups are known to the skilled artisan. Provided such derivatization provides anti-cell proliferative activity in the final compound, all such derivatization is included in the definition of “amino acid side chain moiety.”

[0055] The “amino acids” herein include the known naturally occurring protein amino acids, which are referred to by both their common three-letter abbreviation and single letter abbreviation (see generally Synthetic Peptides: A User's Guide, G. A. Grant, editor, W.H. Freeman & Co., New York (1992), which is incorporated herein by reference). An “amino acid” includes conventional alpha-amino acids as well as beta-amino acids, alpha, alpha disubstituted amino acids and N-substituted amino acids wherein at least one side chain is an amino acid side chain moiety as defined herein. An “amino acid” further includes N-alkyl alpha-amino acids, wherein the N-terminus amino group has a C1 to C6 linear or branched alkyl substituent. The term “amino acid” therefore includes stereoisomers and modifications of naturally occurring protein amino acids, non-protein amino acids, post-translationally modified amino acids, enzymatically synthesized amino acids, derivatized amino acids, constructs or structures designed to mimic amino acids, etc. Modified and unusual amino acids are included in the compounds of the invention and are described generally, for example, in Synthetic Peptides: A User's Guide, cited above; Hruby V. J., Al-obeidi F., Kazmierski W., Biochem. J. 268:249-262 (1990); and Toniolo C., Int. J. Peptide Protein Res. 35:287 (1990), which are incorporated herein by reference.

[0056] In addition, the following amino acids and protecting and modifying groups thereof, are included: gamma-amino butyric acid, 12-amino dodecanoic acid, alpha-aminoisobutyric acid, 6-amino hexanoic acid, 4-(aminomethyl)-cyclohexane carboxylic acid, 8-amino octanoic acid, biphenylalanine, Boc-t-butoxycarbonyl, benzyl, benzoyl, citrulline, diaminobutyric acid, pyrrollysine, diaminopropionic acid, 3,3-diphenylalanine, orthonine, citrulline, 1,3-dihydro-2H-isoindolecarboxylic acid, ethyl, Fmoc-fluorenylmethoxycarbonyl, heptanoyl (CH3-(CH2).sub.5-C(═O)—), hexanoyl (CH3-(CH2)4-C(═O)—), homoarginine, homocysteine, homolysine, homophenylalanine, homoserine, methyl, methionine sulfoxide, methionine sulfone, norvaline (NVA), phenylglycine, propyl, isopropyl, sarcosine (SAR), tert-butylalanine, benzyloxycarbonyl

[0057] In the compounds of the invention, conventional amino acid residues have their conventional meaning. Thus, “Nle” is norleucine, and so on. While it is expected that either D or L residues are active and are included in the invention, for the purposes of the examples, and to save space and time in the Sequence Listing information, residues listed in examples are in the L-isomer configuration unless the D-isomer is specified, for example, as in “D-Ala” or “D-A” for D-Alanine. Nevertheless, D-amino acids at any or all positions of the compounds of the invention are included.

[0058] A single amino acid, including stereoisomers and modifications of naturally occurring protein amino acids, non-protein amino acids, post-translationally modified amino acids, enzymatically synthesized amino acids, non-naturally occurring amino acids including derivatized amino acids, an alpha, alpha disubstituted amino acid derived from any of the foregoing (i.e., an alpha, alpha disubstituted amino acid, wherein at least one side chain is the same as that of the residue from which it is derived), a beta-amino acid derived from any of the foregoing (i.e., a beta-amino acid which other than for the presence of a beta-carbon is otherwise the same as the residue from which it is derived) etc., including all of the foregoing can be referred to herein as a “residue.” Suitable substituents, in addition to the side chain moiety of the alpha-amino acid, include C1 to C6 linear or branched alkyl. Aib is an example of an alpha, alpha disubstituted amino acid. While alpha, alpha disubstituted amino acids can be referred to using conventional L- and D-isomeric references, it is to be understood that such references are for convenience, and that where the substituents at the alpha-position are different, such amino acid can interchangeably be referred to as an alpha, alpha disubstituted amino acid derived from the L- or D-isomer, as appropriate, of a residue with the designated amino acid side chain moiety. Thus (S)-2-Amino-2-methyl-hexanoic acid can be referred to as either an alpha, alpha disubstituted amino acid derived from L-Nle or as an alpha, alpha disubstituted amino acid derived from D-Ala. Similarly, Aib can be referred to as an alpha, alpha disubstituted amino acid derived from Ala. Whenever an alpha, alpha disubstituted amino acid is provided, it is to be understood as including all (R) and (S) configurations thereof.

[0059] An “N-substituted amino acid” includes any amino acid wherein an amino acid side chain moiety is covalently bonded to the backbone amino group, optionally where there are no substituents other than H in the alpha-carbon position. Sarcosine is an example of an N-substituted amino acid. By way of example, sarcosine can be referred to as an N-substituted amino acid derivative of Ala, in that the amino acid side chain moiety of sarcosine and Ala is the same, methyl.

[0060] The term “peptidomimetic” includes a molecule disclosed herein which is a mimic of a residue (referred to as a “mimetic”), including but not limited to piperazine core molecules, keto-piperazine core molecules and diazepine core molecules. Unless otherwise specified, an amino acid mimetic of an invention compound includes both a carboxyl group and amino group, and a group corresponding to an amino acid side chain, or in the case of a mimetic of Glycine, no side chain other than hydrogen.

[0061] By way of example, these would include compounds which mimic the sterics, surface charge distribution, polarity, etc. of a naturally occurring amino acid, but need not be an amino acid, which would impart stability in the biological system. For example, Proline may be substituted by other lactams or lactones of suitable size and substitution; Leucine may be substituted by an alkyl ketone, N-substituted amide, as well as variations in amino acid side chain length using alkyl, alkenyl or other substituents, others may be apparent to the skilled artisan. The essential element of making such substitutions is to provide a molecule of roughly the same size and charge and configuration as the residue used to design the molecule. Refinement of these modifications will be made by testing the compounds in a binding or other assay, and comparing the structure activity relationship. Such methods are within the scope of the skilled artisan working in medicinal chemistry and drug development.

[0062] It will be appreciated that the compounds of the invention can have more than one asymmetric center, and are therefore capable of existing in more than one stereoisomeric form. Some of the compounds may also exist as geometric isomers and rotamers. Furthermore, some compounds of the invention may also have conformational axial chirality. The invention extends to each of these forms individually and to mixtures thereof, including racemates. In one aspect, isomers may be separated conventionally by chromatographic methods or by use of a resolving agent. In another aspect, individual isomers, or enantiomerically pure isomers, are prepared by synthetic schemes, such as those disclosed herein or variants of such schemes, employing asymmetric synthesis using chiral intermediates, reagents or catalysts.

[0063] Either terminus of the conserved motif, or any peptide comprising the conserved motif, may be protected from degradation by any terminal group. For example, at the C-terminus a terminal group attached through the terminal carbon atom or, if provided, terminal carboxyl group, of the C-terminus of a construct attached thereto. The terminal ring carbon atom or, if provided, terminal carboxyl group, may form a part of a residue, or may form a part of an amino acid surrogate. For example, the C-terminus capping group forms a part of an amino acid surrogate which is at the C-terminus position of the construct. The C-terminus capping group includes, but is not limited to, —(CH2)n-OH, —(CH2)n-C(═O)—OH, —(CH2)m-OH, —(CH2)n-C(═O)—N(V1)(V2), —(CH2)n-C(═O)—(CH2)m-N(V1)(V2), —(CH2)n-O—(CH2)m-CH3, —(CH2)n-C(═O)—NH—(CH2)m-CH3, —CH2)n-C(═O)—NH—(CH2)m-N(V1)(V2), —(CH2)n-C(═O)—N—((CH2)m-N(V1)(V2))-2, —(CH2)n-C(═O)—NH—CH(—C(═O)—OH)—(CH2)-m-N(V1)(V2), —C(═O)—NH—(CH2)m-NH—C(═O)—CH(N(V1)(V2))-((CH2)m-N(V1)(V2)), or —(CH2)n-C(═O)—NH—CH(—C(═O)—NH2)-(CH2)-m-N(V1)(V2), including all (R) or (S) configurations of the foregoing, where V1 and V2 are each independently H, a C1 to C7 linear or branched alkyl chain, m is 0 to 7 and n is 0 to 2; or any omega amino aliphatic, terminal aryl or aralkyl, including groups such as methyl, dimethyl, ethyl, propyl, isopropyl, butyl, isobutyl, pentyl, hexyl, allyl, cyclopropane methyl, hexanoyl, heptanoyl, acetyl, propionoyl, butanoyl, phenylacetyl, cyclohexylacetyl, naphthylacetyl, cinnamoyl, phenyl, benzyl, benzoyl, 7′-amino heptanoyl, other groups known in the art, or any single natural or unnatural alpha-amino acid, beta-amino acid or alpha, alpha disubstituted amino acid, including all chiral configurations of the foregoing, optionally in combination with any of the foregoing non-amino acid capping groups.

[0064] The N-terminus of the compound including a conserved motif, or a peptide comprising the motif, may be protected from degradation by any terminal group attached through the terminal group attached through the terminal amine of the N-terminus of a construct. The terminal amine may form a part of a residue, or may form a part of an amino acid surrogate. For example, the N-terminus capping group forms a part of an amino acid surrogate, which is at the N-terminus position of the construct. The N-terminus capping group includes, but is not limited to, any omega amino aliphatic, acyl group or terminal aryl or aralkyl including groups such as methyl, dimethyl, ethyl, propyl, isopropyl, butyl, isobutyl, pentyl, hexyl, allyl, cyclopropane methyl, hexanoyl, heptanoyl, acetyl, propionoyl, butanoyl, phenylacetyl, cyclohexylacetyl, naphthylacetyl, cinnamoyl, phenyl, benzyl, benzoyl, 7′-amino heptanoyl, other groups known in the art, or alternatively an N-terminus capping group is —(CH2)m-NH(V3), —(CH2)m-CH3, —C(═O)—(CH2)m-CH3, —C(═O)—(CH2)m-NH(V3), —C(═O)—(CH2)m-C(═O)—OH, —C(═O)—(CH2)m-C(═O)—(V4), —(CH2)m-C(═O)—OH, —(CH2)m-C(═O)—(V4), C(═O)—(CH2)m-O(V3), —(CH2)m-O(V3), C(═O)—(CH2)m-S(V3), or —(CH2)m-S(V3), where V3 is H or a C1 to C17 linear or branched alkyl chain, and V4 is a C1 to C17 linear or branched alkyl chain and m is 0 to 17. A phenyl ring is “substituted” when the phenyl ring includes one or more substituents independently comprising hydroxyl, halogen, alkyl, or aryl groups attached directly or through an ether linkage. Where the phenyl ring is so substituted, the amino acid residue may be referred to as substituted, as in substituted Phe, substituted HPhe.

[0065] The variations can be made using methods known to one skilled in the art such as oligonucleotide-mediated (site-directed) mutagenesis, alanine scanning, and PCR mutagenesis. Site-directed mutagenesis [Carter et al., Nucl. Acids Res., 13:4331 (1986); Zoller et al., Nucl. Acids Res., 10:6487 (1987)], cassette mutagenesis [Wells et al., Gene, 34:315 (1985)], restriction selection mutagenesis [Wells et al., Philos. Trans. R. Soc. London SerA, 317:415 (1986)] and other techniques can be performed on the cloned DNA to produce invention compounds or variations, derivatives, substitutions or modifications thereof.

[0066] Covalent modifications of the compound are included within the invention. One type of covalent modification includes reacting targeted amino acid residues with an organic derivatizing agent that is capable of reacting with selected side chains or the N- or C-terminal residues of the peptide. Derivatization with bifunctional agents is useful, for instance, for cross linking peptide to a water-insoluble support matrix or surface for use in the method for purifying anti-peptide antibodies, and vice-versa. Commonly used cross linking agents include, e.g., 1,1-bis(diazoacetyl)-2-phenylethane, glutaraldehyde, N-hydroxysuccinimide esters, for example, esters with 4-azidosalicylic acid, homobifunctional imidoesters, including disuccinimidyl esters such as 3,3′-dithiobis(succinimidylpropionate), bifunctional maleimides such as bis-N-maleimido-1,8-octane and agents such as methyl-3-[(p-azidophenyl)dithio]propioimidate.

[0067] Other modifications include deamidation of glutaminyl and asparaginyl residues to the corresponding glutamyl and aspartyl residues, respectively, hydroxylation of proline and lysine, phosphorylation of hydroxyl groups of seryl or threonyl residues, methylation of the alpha-amino groups of lysine, arginine, and histidine side chains [T. E. Creighton, Proteins: Structure and Molecular Properties, W.H. Freeman & Co., San Francisco, pp. 79-86 (1983)], acetylation of the N-terminal amine, amidation of any C-terminal carboxyl group, etc.

[0068] Another type of covalent modification of the one or more residues of the compound of the invention includes glycosylation. “Glycosylation” is intended to mean adding or deleting one or more carbohydrate moieties (either by removing the underlying glycosylation site or by deleting the glycosylation by chemical and/or enzymatic means), and/or adding one or more glycosylation sites that may or may not be present in the native sequence. In addition, the phrase includes qualitative changes in the glycosylation of the native proteins, involving a change in the nature and proportions of the various carbohydrate moieties present.

[0069] Addition of glycosylation sites to the compound can be accomplished by altering the amino acid sequence. The alteration may be made, for example, by the addition of, or substitution by, one or more serine or threonine residues (for O-linked glycosylation sites) or asparagine (N-linked glycosylation site) to the compound. Of course, the compound may optionally be altered through changes at the DNA level, particularly by mutating the DNA encoding the peptide polypeptide at preselected bases such that codons are generated that will translate into the desired amino acids. Another means of increasing the number of carbohydrate moieties on the peptide polypeptide is by chemical or enzymatic coupling of glycosides to the polypeptide (see, for example, in WO 87/05330; and in Aplin and Wriston, CRC Crit. Rev. Biochem., pp. 259 (1981)). Removal of carbohydrate moieties may be accomplished chemically or enzymatically or by mutational substitution of codons encoding for amino acid residues that serve as targets for glycosylation. Chemical deglycosylation techniques are known (see, for example, Hakimuddin, et al., Arch. Biochem. Biophys., 259:52 (1987) and Edge et al., Anal. Biochem., 118:131 (1981)). Enzymatic cleavage of carbohydrate moieties on polypeptides can be achieved by the use of a variety of endo- and exo-glycosidases (see, for example, Thotakura et al., Meth. Enzymol. 138:350 (1987)).

[0070] Another type of covalent modification includes linking the compound to any of a variety of nonproteinaceous polymers, e.g., polyethylene glycol (PEG), polypropylene glycol, or polyoxyalkylenes (see, for example, U.S. Pat. Nos. 4,640,835; 4,496,689; 4,301,144; 4,670,417; 4,791,192 and 4,179,337).

[0071] The compounds of the invention can also be modified to form a chimeric molecule. In accordance with the invention, there are provided compounds that include a heterologous domain. A heterologous domain can be an addition or insertion. A heterologous domain can consist of any of a variety of different types of small or large functional moieties. Particular non-limiting examples of heterologous domains include, for example, tags, detectable labels and cytotoxic agents. Such moieties include peptides, nucleic acids, carbohydrate, lipid or small organic compounds, such as a drug (e.g., a cell proliferative agent), metals (gold, silver), etc.

[0072] Specific examples of tags and detectable labels include enzymes (horseradish peroxidase, urease, catalase, alkaline phosphatase, beta-galactosidase, chloramphenicol transferase); enzyme substrates; ligands (e.g., biotin); receptors (avidin); radionuclides (e.g., C¹⁴, S³⁵, P³², P³³, H³, I¹²⁵, I¹³¹, gallium-67 and 68, scantium-47, indium-111, radium-223); T7-, His-, myc-, HA- and FLAG-tags; electron-dense reagents; energy transfer molecules; paramagnetic labels; fluorophores (fluorescein, rhodamine, phycoerthrin); chromophores; chemi-luminescent (imidazole, luciferase); and bio-luminescent agents. Specific examples of cytotoxic agents include diptheria, toxin, cholera toxin and ricin.

[0073] In one embodiment, a heterologous domain comprises a peptide, heterologous polypeptide or an amino acid sequence fused to a compound. A chimeric molecule can include a fusion of the compound with a tag polypeptide which provides an epitope to which an anti-tag antibody can selectively bind. The epitope tag is generally placed at the end of the compound, e.g., at the amino- or carboxyl-terminus. The epitope-tagged forms can be detected using an antibody against the tag polypeptide. Also, the epitope tag enables the compound to be readily purified by affinity purification using an anti-tag antibody or another type of affinity matrix that binds to the epitope tag. Various tag polypeptides and their respective antibodies are known to the skilled artisan. In an alternative embodiment, the chimeric molecule may comprise a fusion of the compound with an immunoglobulin or a particular region of an immunoglobulin. For a bivalent form of the chimeric molecule (also referred to as an “immunoadhesin”), such a fusion could be to the Fc region of an IgG molecule.

[0074] Additional examples of heterologous domains include, for example, anti-cell proliferative agents (e.g., anti-neoplastic, anti-tumor or anti-cancer, or anti-metastasis agents). Specific non-limiting examples of anti-cell proliferative agents are disclosed herein and known in the art.

[0075] Linker sequences may be inserted between the compound, and the heterologous domain so that the two entities maintain, at least in part, a distinct function or activity. Linker sequences may have one or more properties that include a flexible structure, an inability to form an ordered secondary structure or a hydrophobic or charged character which could promote or interact with either domain. Amino acids typically found in flexible protein regions include Gly, Asn and Ser. Other near neutral amino acids, such as Thr and Ala, may also be used in the linker sequence. The length of the linker sequence may vary (see, e.g., U.S. Pat. No. 6,087,329). Linkers further include chemical cross-linking and conjugating agents, such as sulfo-succinimidyl derivatives (sulfo-SMCC, sulfo-SMPB), disuccinimidyl suberate (DSS), disuccinimidyl glutarate (DSG) and disuccinimidyl tartrate (DST).

[0076] The term “isolated” used as a modifier of a compound means that the compound is manipulated or made by the hand of man or is separated from one or more other components in their naturally occurring in vivo environment. Generally, if such compounds exist naturally, the compounds are separated to be substantially free of one or more materials with which they normally associate with in nature, for example, one or more protein, nucleic acid, lipid, carbohydrate, cell membrane, etc. Thus, an isolated compound is substantially separated from other biological components in the cell of the organism in which the compound naturally occurs, or from the artificial medium in which it is produced (e.g., synthetically or through cell culture). For example, an isolated polypeptide is substantially separated from other polypeptides and nucleic acid and does not include a library of polypeptides or polynucleotides present among millions of polypeptide or nucleic acid sequences, such as a polypeptide, genomic or cDNA library, for example.

[0077] The term “isolated” does not exclude alternative physical forms of the compound, for example, an isolated peptide could include peptide multimers, disulfide linkages within or with other peptides, post-translational modifications (e.g., glycosylation, phosphorylation) and modified or derivatized forms. The term isolated is also intended not to exclude compounds of the invention having anti-cell proliferative activity that are present in a subject after administration. Such compounds in a subject can result from administration of the compound to the subject, or conversion of a prodrug form to a compound after the prodrug is administered to a subject. Thus, it is expressly intended that the compounds of the invention include prodrugs that convert to an invention compound subsequent to administration to a subject.

[0078] The term “purified” used as a modifier of a compound refers to a compound free of most or all of the materials with which it typically associates with in nature. Thus, a compound separated from cells is considered to be purified when separated from cellular components, while a chemically synthesized compound is considered to be substantially purified when separated from its chemical precursors. Purified therefore does not require absolute purity. Furthermore, a “purified” compound can be combined with one or more other molecules. Thus, the term “purified” does not exclude compound combinations.

[0079] “Purified” compounds include compounds produced by standard purification methods. The term also includes proteins and nucleic acids produced by recombinant expression in a host cell as well as chemical synthesis. “Purified” can also refer to a compound in which the level of contaminants is below a level that is acceptable to a regulatory agency for administration to a human or non-human animal, for example, the Food and Drug administration (FDA).

[0080] Substantial purity can be at least about 60% or more of the molecule by mass. Purity can also be about 70% or 80% or more, and can be greater, for example, 90% or more. Purity can be less, for example, in a pharmaceutical carrier the amount of a molecule by weight % can be less than 60% but the relative proportion of the compound compared to other components with which it is normally associated with will be greater. Purity can be determined by any appropriate method, including, for example, UV spectroscopy, chromatography (e.g., HPLC, gas phase), gel electrophoresis (e.g., silver or coomassie staining) and sequence analysis (peptide and nucleic acid).

[0081] The invention includes in vivo methods. For example, a cell such as an undesirably proliferating cell or cell proliferative disorder can be present in a subject, such as a mammal (e.g., a human subject). A subject having such cells may therefore be treated by administering, for example, a compound of the invention, optionally that has been shown to bind to such cells pr to NPs.

[0082] In accordance with the invention, there are provided methods of treating undesirable cell proliferation or a cell proliferative or hyperproliferative disorder in a subject. Such methods can be practiced with any of the compounds of the invention set forth herein. In one embodiment, a method includes administering to a subject an amount of compound having a conserved motif, effective to treat the undesirable cell proliferation or a cell proliferative or hyperproliferative disorder in the subject.

[0083] As used herein, the terms “cell proliferative disorder” and “hyperproliferative disorder” and grammatical variations thereof, when used in reference to a cell, tissue or organ, refers to any undesirable, excessive or abnormal cell, tissue or organ growth, proliferation, survival differentiation or failure to differentiate. A hyperproliferative cell denotes a cell whose growth, proliferation, or survival is greater than desired or is abnormal, such as compared to a reference normal cell, e.g., a cell that is of the same tissue or organ but is not a hyperproliferative cell, or a cell that fails to differentiate normally or completely. Undesirable cell proliferation and hyperproliferative disorders include diseases and physiological conditions, both benign hyperplastic conditions characterized by undesirable, excessive or abnormal cell numbers, cell growth, cell proliferation, cell survival or differentiation in a subject. Specific examples of such disorders include non-metastatic and metastatic neoplasia, tumors and cancers (malignancies), whether primary or secondary to the primary lesion. Additional examples include benign hyperplasia (e.g., skin tags, mylodisplasia, precancerous lesions, and benign prostatic hypertrophy (BPH)) and other disorders not characterized as a tumor, cancer or neoplasia but having features of abnormal or undesirable cell growth, proliferation or survival, such as fibrosis, scarring, cysts, psoriasis, athersclorosis, etc.

[0084] In various embodiments, a method includes administering to a subject a compound of the invention in an amount effective to treat the cell proliferative or hyperproliferative disorder in the subject. In particular aspects, the disorder is a neoplasia, tumor or metastatic or non-metastatic cancer (malignancy). In additional aspects, the disorder affects or is present in part at least in breast, lung, thyroid, head and neck, nasopharynx, nose or sinuses, brain, spine, adrenal gland, thyroid, lymph, gastrointestinal (mouth, esophagus, stomach, duodenum, ileum, jejunum (small intestine), colon, rectum), genito-urinary tract (uterus, ovary, cervix, bladder, testicle, penis, prostate), kidney, pancreas, adrenal gland, liver, bone, bone marrow, lymph, blood, muscle, skin, or hematopoetic system.

[0085] The terms “tumor,” “cancer” and “neoplasia” are used interchangeably and refer to a cell or population of cells whose growth, proliferation or survival is greater than growth, proliferation or survival of a normal counterpart cell, e.g. a cell proliferative or differentiative disorder. Typically, the growth is uncontrolled. The term “malignancy” refers to invasion of nearby tissue. The term “metastasis” refers to spread or dissemination of a tumor, cancer or neoplasia to other sites, locations, regions or organ or tissue systems within the subject, in which the sites, locations regions or organ or tissue systems are distinct from the primary tumor, cancer or neoplasia.

[0086] Invention methods can be used to reduce or inhibit primary or secondary (or any lesion subsequent to the primary lesion) tumor, cancer or neoplastic cell growth, proliferation, or survival; reduce or inhibit tumor, cancer or neoplastic malignancy or growth or invasion into nearby tissue, reduce or inhibit tumor, cancer or neoplastic metastasis of a primary tumor, cancer or neoplasia to other sites, regions or systems, or the formation or establishment of metastatic tumors, cancers or neoplasias at other sites, regions or systems distinct from the primary tumor, cancer or neoplasia thereby inhibiting or reducing relapse or progression. Thus, methods of the invention include, among other things, 1) reducing or inhibiting growth, proliferation, survival, mobility or invasiveness of a primary tumor, cancer or neoplasia; 2) reducing or inhibiting growth, proliferation, survival, mobility or invasiveness of a primary tumor, cancer or neoplasia that potentially or does develop metastases; 3) reducing or inhibiting formation or establishment of metastases arising from a primary tumor, cancer or neoplasia to one or more other sites, locations, regions or systems distinct from the primary tumor, cancer or neoplasia; 4) reducing or inhibiting growth or proliferation of a metastasis at one or more other sites, locations, regions or systems distinct from the primary tumor, cancer or neoplasia after a metastasis has formed or has been established; and 5) reducing or inhibiting formation or establishment of additional metastasis after the metastasis has been formed or established.

[0087] Neoplasias, tumors and cancers include a sarcoma, carcinoma, adenocarcinoma, melanoma, myeloma, blastoma, glioma, lymphoma or leukemia. Exemplary cancers include, for example, carcinoma, sarcoma, adenocarcinoma, melanoma, neural (blastoma, glioma), mesothelioma and reticuloendothelial, lymphatic or haematopoietic neoplastic disorders (e.g., myeloma, lymphoma or leukemia). In particular aspects, a neoplasia, tumor or cancer includes a lung adenocarcinoma, lung carcinoma, diffuse or interstitial gastric carcinoma, colon adenocarcinoma, prostate adenocarcinoma, esophagus carcinoma, breast carcinoma, pancreas adenocarcinoma, ovarian adenocarcinoma, or uterine adenocarcinoma.

[0088] Neoplasia, tumors and cancers include benign, malignant, metastatic and non-metastatic types, and include any stage (I, II, III, IV or V) or grade (G1, G2, G3, etc.) of neoplasia, tumor, or cancer, or a neoplasia, tumor, cancer or metastasis that is progressing, worsening, stabilized or in remission.

[0089] Neoplasias, tumors and cancers can arise from a multitude of primary tumor types, including but not limited to breast, lung, thyroid, head and neck, nasopharynx, nose or sinuses, brain, spine, adrenal gland, thyroid, lymph, gastrointestinal (mouth, esophagus, stomach, duodenum, ileum, jejunum (small intestine), colon, rectum), genito-urinary tract (uterus, ovary, cervix, bladder, testicle, penis, prostate), kidney, pancreas, adrenal gland, liver, bone, bone marrow, lymph, blood, muscle, skin, and the hematopoetic system, and may metastasize to secondary sites.

[0090] A “solid neoplasia, tumor or cancer” refers to neoplasia, tumor or cancer (e.g., metastasis) that typically aggregates together and forms a mass. Specific examples include visceral tumors such as melanomas, breast, pancreatic, uterine and ovarian cancers, testicular cancer, including seminomas, gastric or colon cancer, hepatomas, adrenal, renal and bladder carcinomas, lung, head and neck cancers and brain tumors/cancers.

[0091] Carcinomas refer to malignancies of epithelial or endocrine tissue, and include respiratory system carcinomas, gastrointestinal system carcinomas, genitourinary system carcinomas, testicular carcinomas, breast carcinomas, prostatic carcinomas, endocrine system carcinomas, and melanomas. Additional carcinomas can form from the uterine/cervix, lung, head/neck, colon, pancreas, testes, adrenal gland, kidney, esophagus, stomach, liver and ovary. The term also includes carcinosarcomas, e.g., which include malignant tumors composed of carcinomatous and sarcomatous tissues.

[0092] Adenocarcinoma includes a carcinoma of a glandular tissue, or in which the tumor forms a gland like structure. Non-limiting examples include adenocarcinoma or a squamous cell carcinoma, such as an adenocarcinoma of stomach, lung, pancreas, colon, breast, or esophagus squamous cell carcinoma. Further non-limiting examples include a carcinoid carcinoma, invasive ductal carcinoma, germ cell carcinoma in any of stomach, lung, colon, pancreas, esophagus, prostate, breast or testis.

[0093] Melanoma refers to malignant tumors of melanocytes and other cells derived from pigment cell origin that may arise in the skin, the eye (including retina), or other regions of the body.

[0094] Sarcomas refer to malignant tumors of mesenchymal cell origin. Exemplary sarcomas include for example, lymphosarcoma, liposarcoma, osteosarcoma, chondrosarcoma, leiomyosarcoma, rhabdomyosarcoma and fibrosarcoma.

[0095] Neural neoplasias include glioma, glioblastoma, meningioma, neuroblastoma, retinoblastoma, astrocytoma, oligodendrocytoma

[0096] Specific non-limiting examples of neoplasias, tumors and cancers include malignant and non-malignant neoplasias, tumors and cancers, and metastasis of any severity, e.g., grade or stage. In particular, gastric (stomach) tissue, lung squamous cell carcinoma, and lung adenocarcinoma cell of any stage (e.g., stages IA, IB, IIA, IIB, IIIA, IIIB or IV) or grade (e.g., grades G1, G2 or G3).

[0097] A “liquid neoplasia, tumor or cancer” refers to a neoplasia, tumor or cancer of the reticuloendothelial or hematopoetic system, such as a lymphoma, myeloma, or leukemia, or a neoplasia that is diffuse in nature. Particular examples of leukemias include acute and chronic lymphoblastic, myeolblastic and multiple myeloma. Typically, such diseases arise from poorly differentiated acute leukemias, e.g., erythroblastic leukemia and acute megakaryoblastic leukemia. Specific myeloid disorders include, but are not limited to, acute promyeloid leukemia (APML), acute myelogenous leukemia (AML) and chronic myelogenous leukemia (CML); lymphoid malignancies include, but are not limited to, acute lymphoblastic leukemia (ALL), which includes B-lineage ALL and T-lineage ALL, chronic lymphocytic leukemia (CLL), prolymphocytic leukemia (PLL), hairy cell leukemia (HLL) and Waldenstrom's macroglobulinemia (WM). Specific malignant lymphomas include, non-Hodgkin lymphoma and variants, peripheral T cell lymphomas, adult T cell leukemia/lymphoma (ATL), cutaneous T-cell lymphoma (CTCL), large granular lymphocytic leukemia (LGF), Hodgkin's disease and Reed-Sternberg disease.

[0098] As used herein, the terms “treat,” “treating,” “treatment” and grammatical variations thereof mean subjecting an individual patient to a protocol, regimen, process or remedy, in which it is desired to obtain a physiologic response or outcome in that patient. Since every treated patient may not respond to a particular treatment protocol, regimen, process or remedy, treating does not require that the desired physiologic response or outcome be achieved in each and every patient or patient population. Accordingly, a given patient or patient population may fail to respond or respond inadequately to treatment.

[0099] Administration methods of the invention may be practiced by any mode of administration or by any route including, for example, systemic, regional and local administration, such as at the site of a cell proliferative disorder. For example, a cell proliferative disorder which is on or under the skin may be treated by local injection, whereas a cell proliferative disorder affecting the bone marrow may require systemic administration. Exemplary administration routes include intravenous, intrarterial, intradermal, intramuscular, subcutaneous, intra-pleural, transdermal (topical), transmucosal, intra-cranial, intra-spinal, intra-ocular, rectal, oral (alimentary) and mucosal. Particular routes of administration can be based in part upon the type or location of the cell proliferative disorder, as well as pharmacology, bioavailability, stability of the compound, etc.

[0100] Methods of the invention include, among other things, methods that provide a detectable or measurable improvement in a condition of a given subject, such as alleviating or ameliorating one or more adverse (physical) symptoms or consequences associated with the presence of a cell proliferative or cellular hyperproliferative disorder, neoplasia, tumor or cancer, or metastasis, i.e., a therapeutic benefit or a beneficial effect.

[0101] A therapeutic benefit or beneficial effect is any objective or subjective, transient, temporary, or long-term improvement in the cell proliferative disorder, or a reduction in onset, severity, duration or frequency of an adverse symptom associated with or caused by cell proliferation or a hyperproliferative disorder such as a neoplasia, tumor or cancer, or metastasis. A satisfactory clinical endpoint of a treatment method in accordance with the invention is achieved, for example, when there is an incremental or a partial reduction in severity, duration or frequency of one or more associated pathologies, adverse symptoms or complications, or inhibition or reversal of one or more of the physiological, biochemical or cellular manifestations or characteristics of cell proliferation or a hyperproliferative disorder such as a neoplasia, tumor or cancer, or metastasis. A therapeutic benefit or improvement therefore can be a cure, such as destruction of target proliferating cells (e.g., neoplasia, tumor or cancer, or metastasis) or ablation of one or more, most or all pathologies, adverse symptoms or complications associated with or caused by cell proliferation or the hyperproliferative disorder such as a neoplasia, tumor or cancer, or metastasis. However, a therapeutic benefit or improvement need not be a cure or complete destruction of all target proliferating cells (e.g., neoplasia, tumor or cancer, or metastasis) or ablation of all pathologies, adverse symptoms or complications associated with or caused by cell proliferation or the cellular hyperproliferative disorder such as a neoplasia, tumor or cancer, or metastasis. For example, partial destruction of a tumor, cancer or neoplasia cell mass or cells, or a stabilization of the tumor, cancer or neoplasia mass, size or cell numbers by inhibiting, slowing, or delaying progression or worsening of the tumor, cancer or neoplasia, can reduce or delay mortality and prolong lifespan even if only for a few days, weeks or months, even if a portion or the bulk of the tumor, cancer or neoplasia mass, size or cells remain.

[0102] Specific non-limiting examples of therapeutic benefit include a reduction in tumor, cancer or neoplasia, or metastasis volume (size or cell mass) or numbers or proliferation of cells, inhibiting or preventing an increase in tumor, cancer or neoplasia volume, size, mass, or cell numbers (e.g., stabilizing), slowing, delaying or inhibiting neoplasia, tumor or cancer malignancy, progression, worsening or metastasis, stimulating, inducing or increasing tumor, cancer or neoplasia cell lysis, apoptosis or differentiation, or inhibiting neoplasia, tumor or cancer cell proliferation, growth or metastasis. An invention method may not take effect immediately. For example, treatment may be followed by an increase in the tumor, cancer or neoplasia cell numbers or mass, but over time eventual slowing, delay, stabilization or reduction in tumor, cancer or neoplasia cell mass, size or numbers of cells in a given subject may subsequently occur after cell lysis or apoptosis of the tumor, cancer or neoplasia, or metastasis.

[0103] Additional adverse symptoms and complications associated with tumor, cancer or neoplasia and metastasis that can be inhibited, reduced, decreased, delayed or prevented include, for example, nausea, lack of appetite, lethargy, pain and discomfort. Thus, a partial or complete decrease or reduction in the severity, duration or frequency of an adverse symptom or complication associated with or caused by a cell proliferative or a hyperproliferative disorder, an improvement in the subjects well being, such as increased energy, appetite, psychological well being, are all particular non-limiting examples of therapeutic benefit. A therapeutic benefit or improvement therefore can also include a subjective improvement in the quality of life of a treated subject.

[0104] In various embodiments, a method reduces or decreases tumor, cancer or neoplasia, or metastasis volume, cell numbers or proliferation, inhibits or prevents an increase in tumor, cancer or neoplasia volume, cell numbers or proliferation, inhibits or delays tumor, cancer or neoplasia progression or worsening, stimulates neoplasia, tumor or cancer, or metastasis cell lysis, apoptosis or differentiation, or inhibits, reduces, decreases or delays tumor, cancer or neoplasia proliferation, malignancy, growth or metastasis. In an additional embodiment, a method prolongs or extends lifespan of the subject. In a further embodiment, a method improves the quality of life of the subject.

[0105] Examination of a biopsied sample containing a tumor, cancer or neoplasia, or metastasis (e.g., blood or tissue sample), can establish tumor, cancer or neoplasia cell mass, volume or cell numbers, and therefore whether a reduction or stabilization in mass, volume or numbers of tumor, cancer or neoplasia cells or inhibition or delay of tumor, cancer or neoplasia cell proliferation, growth, malignancy, metastasis or survival (apoptosis) has occurred. For a solid tumor, cancer or neoplasia, invasive and non-invasive imaging methods can ascertain size, mass volume or cell numbers. Examination of blood or serum, for example, for populations, numbers and types of cells (e.g., hematopoetic cellular hyperproliferative disorders), grades or stages can establish whether a reduction or stabilization in mass, volume, numbers or the type, grade or stage of tumor, cancer or neoplasia cells or inhibition of tumor, cancer or neoplasia proliferation, growth, malignancy, metastasis or survival (apoptosis) has occurred.

[0106] Invention compounds and methods can be combined with any other treatment or therapy that provides a desired effect. In particular, treatments and therapies that have been characterized as having an anti-cell proliferative activity or function are applicable. Exemplary treatments and therapies include anti-cell proliferative or immune enhancing agents or drugs.

[0107] The treatments and therapies can be performed prior to, substantially contemporaneously with any other methods of the invention, for example, an anti-cell proliferative or anti-hyperproliferative disorder (e.g., a tumor, cancer or neoplasia, or metastasis).

[0108] The invention therefore provides combination methods, in which any of the compounds, and modified and variant forms, are used in a combination with any therapeutic regimen, treatment protocol or composition, such as an anti-cell proliferative protocol, agent or drug set forth herein or known in the art. In one embodiment, a method includes administering a compound having a conserved motif, and an anti-cell proliferative or immune enhancing treatment, agent or drug. The anti-cell proliferative or immune enhancing treatment, agent or drug can be administered prior to, substantially contemporaneously with or following administration of the compound.

[0109] As used herein, an “anti-cell proliferative,” “anti-neoplastic,” “anti-tumor,” or “anti-cancer” treatment, therapy, activity or effect means any therapy, treatment regimen, agent, drug, protocol or process that is useful in treating pathologies, adverse symptoms or complications associated with or caused by abnormal or undesirable cell proliferation (hyperproliferation), a cellular hyperproliferative disorder, tumor, cancer or neoplasia, or metastasis. Particular therapies, treatment regimens, agents, drugs, protocol or processes can inhibit, decrease, slow, reduce, delay, or prevent cell proliferation, cell growth, hyperproliferation, tumor, cancer or neoplasia (malignant) growth, proliferation, survival, malignancy or metastasis. Such treatments, therapies, regimens, protocols, agents and drugs, can operate by disrupting, reducing, inhibiting or delaying cell cycle progression or cell proliferation or growth; increasing, stimulating or enhancing cell apoptosis, lysis, death or differentiation; inhibiting nucleic acid or protein synthesis or metabolism; reducing, decreasing, inhibiting or delaying cell division; or decreasing, reducing or inhibiting cell survival, or production or utilization of a cell survival factor, growth factor or signaling pathway (extracellular or intracellular).

[0110] Examples of anti-cell proliferative treatments and therapies include chemotherapy, immunotherapy, radiotherapy (ionizing or chemical), local or regional thermal (hyperthermia) therapy and surgical resection.

[0111] Specific non-limiting classes of anti-cell proliferative agents and drugs include alkylating agents, anti-metabolites, plant extracts, plant alkaloids, nitrosoureas, hormones (steroids), nucleoside and nucleotide analogues. Specific non-limiting examples of microbial toxins include bacterial cholera toxin, pertussis toxin, anthrax toxin, diphtheria toxin, and plant toxin ricin. Specific examples of drugs include cyclophosphamide, azathioprine, cyclosporin A, melphalan, chlorambucil, mechlorethamine, busulphan, methotrexate, 6-mercaptopurine, thioguanine, 5-fluorouracil, 5-fluorouridine, cytosine arabinoside, AZT, 5-azacytidine (5-AZC) and 5-azacytidine related compounds, bleomycin, actinomycin D, mithramycin, mitomycin C, carmustine, calicheamicin, lomustine, semustine, streptozotocin, teniposide, etoposide, hydroxyurea, cisplatin, carboplatin, levamisole, mitotane, procarbazine, dacarbazine, taxol, vinblastine, vincristine, vindesine, doxorubicin, daunomycin and dibromomannitol. Specific non-limiting examples of hormones include prednisone, prednisolone, diethylstilbesterol, flutamide, leuprolide, and gonatrophin releasing hormone antagonists.

[0112] Radiotherapy includes internal or external delivery to a subject. For example, alpha, beta, gamma and X-rays can administered to a subject externally without the subject internalizing or otherwise physically contacting the radioisotope. Specific examples of X-ray dosages range from daily doses of 50 to 200 roentgens for prolonged periods of time (3 to 5/week), to single doses of 2000 to 6000 roentgens. Dosages vary widely, and depend on duration of exposure, the half-life of the isotope, the type of radiation emitted, the cell type and location treated and the progressive stage of the disease. Specific non-limiting examples of radionuclides include, for example, ⁴⁷Sc ⁶⁷Cu, ⁷²Se, ⁸⁸Y, ⁹⁰Sr, ⁹⁰Y, ⁹⁷Ru, ⁹⁹Tc, ¹⁰⁵Rh, ¹¹¹In, ¹²⁵I, ¹³¹I, ¹⁴⁹Tb, ¹⁵³Sm, ¹⁸⁶Re, ¹⁸⁸Re, ¹⁹⁴Os, ²⁰³Pb, ²¹¹At, ²¹²Bi, ²¹³Bi, ²¹²Pb, ²²³Ra, ²²⁵Ac, ²²⁷Ac, and ²²⁸Th.

[0113] Antibodies that bind to tumor, cancer or neoplasia cells are a particular example of an anti-cell proliferative treatment or therapy. Anti-tumor antibodies include, for example, M195 antibody which binds to leukemia cell CD33 antigen (U.S. Pat. No. 6,599,505); monoclonal antibody DS6 which binds to ovarian carcinoma CA6 tumor-associated antigen (U.S. Pat. No. 6,596,503); human IBD12 monoclonal antibody which binds to epithelial cell surface H antigen (U.S. Pat. No. 4,814,275); and BR96 antibody which binds to Lex carbohydrate epitope expressed by colon, breast, ovary, and lung carcinomas. Additional anti-tumor, cancer or neoplasia antibodies that can be employed include, for example, Herceptin (anti-Her-2 neu antibody), Rituxan®, Zevalin, Bevacizumab (Avastin), Bexxar, Campath®, Oncolym, 17-1A (Edrecolomab), 3F8 (anti-neuroblastoma antibody), MDX-CTLA4, IMC-C225 (Cetuximab) and Mylotarg.

[0114] As used here, the term “immune enhancing,” when used in reference to a treatment, therapy, agent or drug means that the treatment, therapy, agent or drug provides an increase, stimulation, induction or promotion of an immune response, humoral or cell-mediated. Such therapies can enhance immune response generally, or enhance immune response to a specific target, e.g., a cell proliferative or cellular hyperproliferative disorder such as a tumor, cancer or neoplasia, or metastasis.

[0115] Specific non-limiting examples of immune enhancing agents include antibody, cell growth factors, cell survival factors, cell differentiative factors, cytokines and chemokines. Additional examples of immune enhancing agents and treatments include immune cells such as lymphocytes, plasma cells, macrophages, dendritic cells, NK cells and B-cells that either express antibody against the cell proliferative disorder or otherwise are likely to mount an immune response against a cell proliferative disorder (e.g., a tumor, cancer or neoplasia). Cytokines that enhance or stimulate immunogenicity include IL-2, IL-1α, IL-1β, IL-3, IL-6, IL-7, granulocyte-macrophage-colony stimulating factor (GMCSF), IFN-γ, IL-12, TNF-α, and TNFβ, which are also non-limiting examples of immune enhancing agents. Chemokines including MIP-1α, MIP-1β, RANTES, SDF-1, MCP-1, MCP-2, MCP-3, MCP-4, eotaxin, eotaxin-2, I-309/TCA3, ATAC, HCC-1, HCC-2, HCC-3, PARC, TARC, LARC/MIP-3α, CKβ, CKβ6, CKβ7, CKβ8, CKβ9, CKβ11, CKβ12, C10, IL-8, ENA-78, GROα, GROβ, GCP-2, PBP/CTAPIIIβ-TG/NAP-2, Mig, PBSF/SDF-1, and lymphotactin are further non-limiting examples of immune enhancing agents.

[0116] Methods of the invention also include, among other things, methods that result in a reduced need or use of another treatment protocol or therapeutic regimen, process or remedy. For example, for a tumor, cancer or neoplasia, or metastasis, a method of the invention has a therapeutic benefit if in a given subject it results in a less frequent or reduced dose or elimination of an anti-cell proliferative (e.g., anti-neoplastic, anti-tumor or anti-cancer) or immune enhancing treatment or therapy, such as a chemotherapeutic drug, radiotherapy, immunotherapy, or surgery for tumor, cancer or neoplasia, or metastasis treatment or therapy.

[0117] In accordance with the invention, methods of reducing need or use of an anti-cell proliferative (e.g., anti-neoplastic, anti-tumor, anti-cancer or anti-metastasis) treatment or therapy are provided. In various embodiments, a method includes administering to a subject a compound of the invention, in an amount effective to treat a cell proliferative disorder (e.g., a tumor, cancer or neoplasia, or metastasis), and to reduce or eliminate need for an anti-cell proliferative (anti-neoplasia, anti-tumor or anti-cancer, or anti-metastasis) or immune-enhancing therapy. The methods can be performed prior to, substantially contemporaneously with or following administration of an anti-tumor, cancer or neoplasia or metastasis, or immune-enhancing therapy.

[0118] The doses or “amount effective” or “amount sufficient” in a method of treatment or therapy is an amount in which there is a desired effect, such as a therapeutic benefit or improvement includes, for example, any objective or subjective alleviation or amelioration of one, several or all pathologies, adverse symptoms or complications associated with or caused by the target (e.g., cell proliferative disorder), to a measurable or detectable extent, although preventing, inhibiting or delaying a progression or worsening of the target (e.g., cell proliferative disorder) pathology, adverse symptom or complication, is a satisfactory outcome. Thus, in the case of a cell proliferative disorder, the amount will desirably be sufficient to provide a therapeutic benefit to a given subject or to alleviate or ameliorate a pathology, adverse symptom or complication of the proliferative disorder in a given subject. The dose may be proportionally increased or reduced as indicated by the status of treatment or the particular target (e.g., cell proliferative disorder) or any side effect(s) of the treatment or therapy.

[0119] Exemplary non-limiting amounts (doses) are in a range of about 0.1 mg/kg to about 100 mg/kg, and any numerical value or range or value within such ranges. Greater or lesser amounts (doses) can be administered, for example, 0.01-500 mg/kg, and any numerical value or range or value within such ranges. Additional exemplary non-limiting amounts (doses) range from about 0.5-50 mg/kg, 1.0-25 mg/kg, 1.0-10 mg/kg, and any numerical value or range or value within such ranges.

[0120] Methods of the invention may be practiced one or more times (e.g., 1-10, 1-5 or 1-3 times) per day, week, month, or year. The skilled artisan will know when it is appropriate to modify an administration regimen, such as to increase, or to reduce, delay or discontinue administration. An exemplary non-limiting dosage schedule is 1-7 times per week, for 1, 2, 3, 4, 5, 6, 7, 8, 9, 10, 15, 20 or more weeks, and any numerical value or range or value within such ranges.

[0121] Of course, as is typical for any treatment or therapy, different subjects will exhibit different responses to treatment and some may not respond or respond inadequately to a particular treatment protocol, regimen or process. Amounts effective or sufficient will therefore depend at least in part upon the disorder treated (e.g., cell proliferation, benign hyperplasia or a tumor, cancer or neoplasia and the type, grade or stage, e.g., the a tumor, cancer or neoplasia grade and if it is advanced, late or early stage), the therapeutic effect desired, as well as the individual subject (e.g., the bioavailability within the subject, gender, age, etc.) and the subject's response to the treatment based upon genetic and epigenetic variation (e.g., pharmacogenomics).

[0122] The terms “subject” and “patient” are used interchangeably herein and refer to animals, typically mammals, such as humans, non-human primates (gorilla, chimpanzee, orangutan, macaque, gibbon), domestic animals (dog and cat), farm and ranch animals (horse, cow, goat, sheep, pig), laboratory and experimental animals (mouse, rat, rabbit, guinea pig). Subjects include disease model animals (e.g., such as mice, rats and non-human primates) for studying in vivo efficacy (e.g., a tumor, cancer or neoplasia, or metastasis animal model). Human subjects include children, for example, newborns, infants, toddlers and teens, between the ages of 1 and 5, 5 and 10 and 10 and 18 years, young adults between the ages of 18 and 25, adults between 25 and 60 years, and the elderly, for example, between the ages of 60 and 65, 65 and 70 and 70 and 100 years.

[0123] Subjects include mammals (e.g., humans) in need of treatment, that is, they have undesirable or aberrant cell proliferation (cell hyperproliferation) or a cell proliferative disorder (e.g., a tumor, cancer or neoplasia, or metastasis). Subjects also include those at risk of having undesirable cell proliferation or a cell proliferative disorder. Subjects further include a subject in need of an anti-cell proliferative or immune enhancing treatment or therapy due to a clinical or lab diagnosis warranting such treatment, subjects undergoing an anti-cell proliferative or immune enhancing therapy, and subjects having undergone an anti-cell proliferative or immune enhancing therapy or treatment and are at risk of relapse or recurrence, including a subject that is in remission for a cell proliferative disorder (e.g., tumor, cancer or neoplasia) but who may be at risk of relapse.

[0124] At risk subjects include those with a family history, genetic predisposition, or who have suffered a previous affliction with a cell proliferative or hyperproliferative disorder (e.g., a benign hyperplasia, tumor, cancer or neoplasia, or metastasis), and are at risk of relapse or recurrence. At risk subjects further include environmental exposure to carcinogens or mutagens, such as smokers, or those in an occupational (industrial, chemical, agricultural) setting. Such subjects at risk for developing a cell proliferative or hyperproliferative disorder such as tumor, cancer or neoplasia can be identified with genetic screens for tumor associated genes, gene deletions or gene mutations. Subjects that lack Brca1 are at risk for developing breast cancer, for example. Subjects at risk for developing colon cancer have deleted or mutated tumor suppressor genes, such as adenomatous polyposis coli (APC), for example. At risk subjects having particular genetic predisposition towards cell proliferative disorders are known to the killed artisan (see, e.g., The Genetic Basis of Human Cancer 2^{nd} ed. by Bert Vogelstein (Editor), Kenneth W. Kinzler (Editor) (2002) McGraw-Hill Professional; The Molecular Basis of Human Cancer. Edited by W B Coleman and G J Tsongalis (2001) Humana Press; and The Molecular Basis of Cancer. Mendelsohn et al., W B Saunders (1995)).

[0125] At risk subjects can therefore be treated in order to inhibit or reduce the likelihood of developing a cell proliferative or hyperproliferative disorder, or after having been cured or treated for a cell proliferative disorder, suffering a relapse or recurrence of the same or a different cell proliferative or hyperproliferative disorder (e.g., a tumor, cancer or neoplasia). The result of such treatment can be to reduce the risk of developing a cell proliferative or hyperproliferative disorder, or to prevent a cell proliferative or hyperproliferative disorder, or a pathology, adverse symptom or complication thereof in the treated at risk subject.

[0126] The invention further provides kits, including compounds of the invention, modified and variants forms, and pharmaceutical formulations, packaged into suitable packaging material, optionally in combination with instructions for using the kit components, e.g., instructions for performing a method of the invention. In various embodiments, a kit includes a compound of the invention and instructions are for treating undesirable cell proliferation or hyperproliferation, or a hyperproliferative disorder. In one aspect, the instructions are for treating a tumor, cancer or neoplasia, or metastasis. In another aspect, a kit further includes an anti-cell proliferative or immune enhancing treatment, agent or drug. In particular aspects, a kit includes an anti-neoplastic, anti-cancer or anti-tumor agent. In still further aspects, a kit includes an article of manufacture, for example, an article of manufacture for delivering the compound, anti-cell proliferative or immune enhancing treatment, agent or drug into a subject at the site of the lesion, or locally, regionally or systemically.

[0127] The term “packaging material” refers to a physical structure housing the components of the kit. The packaging material can maintain the components sterilely, and can be made of material commonly used for such purposes (e.g., paper, corrugated fiber, glass, plastic, foil, ampules, etc.). The label or packaging insert can include appropriate written instructions, for example, practicing a method of the invention, e.g., treating a cell proliferative or hyperproliferative disorder, an assay for screening for, detecting or identifying a compound having anti-cell proliferative activity. Thus, in additional embodiments, a kit includes a label or packaging insert including instructions for practicing a method of the invention in solution, in vitro, in vivo, or ex vivo.

[0128] Instructions can therefore include instructions for practicing any of the methods of the invention described herein. For example, invention pharmaceutical compositions can be included in a container, pack, or dispenser together with instructions for administration to a subject to treat a cell proliferative or hyperproliferative disorder, such as a tumor, cancer or neoplasia, or metastasis. Instructions may additionally include indications of a satisfactory clinical endpoint or any adverse symptoms or complications that may occur, storage information, expiration date, or any information required by regulatory agencies such as the Food and Drug Administration for use in a human subject.

[0129] The instructions may be on “printed matter,” e.g., on paper or cardboard within the kit, on a label affixed to the kit or packaging material, or attached to a vial or tube containing a component of the kit. Instructions may comprise voice or video tape and additionally be included on a computer readable medium, such as a disk (hard disk), optical CD such as CD- or DVD-ROM/RAM, magnetic tape, electrical storage media such as RAM and ROM and hybrids of these such as magnetic/optical storage media.

[0130] Invention kits can additionally include a buffering agent, a preservative, or a stabilizing agent. The kit can also include control components for assaying for activity, e.g., a control sample or a standard. Each component of the kit can be enclosed within an individual container or in a mixture and all of the various containers can be within single or multiple packages.

[0131] Compounds of the invention, and other compositions and methods of the invention can be included in or employ pharmaceutical formulations. Such pharmaceutical formulations are useful for treatment of, or administration or delivery to, a subject in vivo or ex vivo.

[0132] Pharmaceutical formulations include “pharmaceutically acceptable” and “physiologically acceptable” carriers, diluents or excipients. As used herein the terms “pharmaceutically acceptable” and “physiologically acceptable” include solvents (aqueous or non-aqueous), solutions, emulsions, dispersion media, coatings, isotonic and absorption promoting or delaying agents, compatible with pharmaceutical administration. Such formulations can be contained in a liquid; emulsion, suspension, syrup or elixir, or solid form; tablet (coated or uncoated), capsule (hard or soft), powder, granule, crystal, or microbead. Supplementary compounds (e.g., preservatives, antibacterial, antiviral and antifungal agents) can also be incorporated into the formulations.

[0133] Pharmaceutical formulations can be made to be compatible with a particular local, regional systemic, or tissue or organ system administration or delivery mode or route. Thus, pharmaceutical formulations include carriers, diluents, or excipients suitable for administration by particular routes. Specific non-limiting examples of routes of administration for compositions of the invention are parenteral, e.g., intravenous, intrarterial, intradermal, intramuscular, subcutaneous, intra-pleural, transdermal (topical), transmucosal, intra-cranial, intra-spinal, intra-ocular, rectal, oral (alimentary), mucosal administration, and any other formulation suitable for the treatment method or administration protocol.

[0134] Solutions or suspensions used for parenteral application can include: a sterile diluent such as water for injection, saline solution, fixed oils, polyethylene glycols, glycerine, propylene glycol or other synthetic solvents; antibacterial agents such as benzyl alcohol or methyl parabens; antioxidants such as ascorbic acid or sodium bisulfite; chelating agents such as ethylenediaminetetraacetic acid; buffers such as acetates, citrates or phosphates and agents for the adjustment of tonicity such as sodium chloride or dextrose. pH can be adjusted with acids or bases, such as hydrochloric acid or sodium hydroxide.

[0135] Pharmaceutical formulations for injection include sterile aqueous solutions (where water soluble) or dispersions and sterile powders for the extemporaneous preparation of sterile injectable solutions or dispersion. For intravenous administration, suitable carriers include physiological saline, bacteriostatic water, Cremophor EL™ (BASF, Parsippany, N.J.) or phosphate buffered saline (PBS). The carrier can be a solvent or dispersion medium containing, for example, water, ethanol, polyol (for example, glycerol, propylene glycol, and liquid polyetheylene glycol, and the like), and suitable mixtures thereof. Fluidity can be maintained, for example, by the use of a coating such as lecithin, by the maintenance of the required particle size in the case of dispersion and by the use of surfactants. Antibacterial and antifungal agents include, for example, parabens, chlorobutanol, phenol, ascorbic acid and thimerosal. Isotonic agents, for example, sugars, polyalcohols such as mannitol, sorbitol, sodium chloride can be included in the composition. Including an agent which delays absorption, for example, aluminum monostearate or gelatin can prolong absorption of injectable compositions.

[0136] Sterile injectable formulations can be prepared by incorporating the active compound in the required amount in an appropriate solvent with one or a combination of above ingredients. Generally, dispersions are prepared by incorporating the active compound into a sterile vehicle containing a basic dispersion medium and any other ingredient. In the case of sterile powders for the preparation of sterile injectable solutions, methods of preparation include, for example, vacuum drying and freeze-drying which yields a powder of the active ingredient plus any additional desired ingredient from a previously prepared solution thereof.

[0137] For transmucosal or transdermal administration, penetrants appropriate to the barrier to be permeated are used in the formulation. Such penetrants are known in the art, and include, for example, for transmucosal administration, detergents, bile salts, and fusidic acid derivatives. Transmucosal administration can be accomplished through the use of nasal sprays, inhalation devices (e.g., aspirators) or suppositories. For transdermal administration, the active compounds are formulated into ointments, salves, gels, creams or patches.

[0138] The pharmaceutical formulations can be prepared with carriers that protect against rapid elimination from the body, such as a controlled release formulation or a time delay material such as glyceryl monostearate or glyceryl stearate. The formulations can also be delivered using articles of manufacture such as implants and microencapsulated delivery systems to achieve local, regional or systemic delivery or controlled or sustained release.

[0139] Biodegradable, biocompatible polymers can be used, such as ethylene vinyl acetate, polyanhydrides, polyglycolic acid, collagen, polyorthoesters, and polylactic acid. Methods for preparation of such formulations are known to those skilled in the art. The materials can also be obtained commercially from Alza Corporation (Palo Alto, Calif.). Liposomal suspensions (including liposomes targeted to cells or tissues using antibodies or viral coat proteins) can also be used as pharmaceutically acceptable carriers. These can be prepared according to known methods, for example, as described in U.S. Pat. No. 4,522,811.

[0140] Additional pharmaceutical formulations appropriate for administration are known in the art (see, e.g., Gennaro (ed.), Remington: The Science and Practice of Pharmacy, 20^{th} ed., Lippincott, Williams & Wilkins (2000); Ansel et al., Pharmaceutical Dosage Forms and Drug Delivery Systems, 7^{th} ed., Lippincott Williams & Wilkins Publishers (1999); Kibbe (ed.), Handbook of Pharmaceutical Excipients American Pharmaceutical Association, 3^{rd} ed. (2000); and Remington's Pharmaceutical Principles of Solid Dosage Forms, Technonic Publishing Co., Inc., Lancaster, Pa., (1993)).

[0141] The compounds used in accordance with the invention, including pharmaceutical formulations can be packaged in dosage unit form for ease of administration and uniformity of dosage. “Dosage unit form” as used herein refers to physically discrete units suited as unitary dosages treatment; each unit contains a quantity of the compound in association with the carrier, excipient, diluent, or vehicle calculated to produce a desired treatment or therapeutic (e.g., beneficial) effect. The unit dosage forms will depend on a variety of factors including, but not necessarily limited to, the particular compound employed, the effect to be achieved, and the pharmacodynamics and pharmacogenomics of the subject to be treated.

[0142] In accordance with the invention, there are provided methods of identifying a compound having anti-cell proliferative activity, as well as methods for measuring anti-cell proliferative activity of a compound. In one embodiment, a method includes screening a compound for inhibition of cell proliferation (e.g., a tumor, cancer or neoplastic cell). A compound that is determined to inhibit cell proliferation is a compound having anti-cell proliferative activity. In another embodiment, a method includes screening a compound for binding to NPRC or activation of NPRC. A compound that is determined to bind to NPRC or activate NPRC is a compound having anti-cell proliferative activity.

[0143] In order to calculate, evaluate or identify a given compound for anti-cell proliferative activity or an amount of anti-cell proliferative activity, a variety of assays can be used. For example, cell toxicity and viability (cell apoptosis, lysis, growth proliferation, etc.) can be measured on the basis of colorimetric, luminescent, radiometric, or fluorometric assays known in the art. Colorimetric techniques, for example, Trypan Blue exclusion can be used to determine cell viability. In brief, cells are stained with Trypan Blue and counted using a hemocytometer. Viable cells exclude the dye whereas dead and dying cells take up the blue dye and are easily distinguished under a light microscope. Neutral Red is adsorbed by viable cells and concentrates in cell lysosomes; viable cells can be determined with a light microscope by quantitating numbers of Neutral Red stained cells.

[0144] Fluorometric techniques for determining cell viability include, for example, propidium iodide, a fluorescent DNA intercalating agent. Propidium iodide is excluded from viable cells but stains the nucleus of dead cells. Flow cytometry of propidium iodide labeled cells can then be used to quantitate viable and dead cells. Release of lactate dehydrogenase (LDH) indicates structural damage and death of cells, and can be measured by a spectrophotometric enzyme assay. Bromodeoxyuridine (BrdU) is incorporated into newly synthesized DNA and can be detected with a fluorochrome-labeled antibody. The fluorescent dye Hoechst 33258 labels DNA and can be used to quantitate proliferation of cells (e.g., flow cytometry). Quantitative incorporation of the fluorescent dye carboxyfluorescein diacetate succinimidyl ester (CFSE or CFDA-SE) can provide cell division analysis (e.g., flow cytometry). This technique can be used either in vitro or in vivo. 7-aminoactinomycin D (7-AAD) is a fluorescent intercalator that undergoes a spectral shift upon association with DNA, and can provide cell division analysis (e.g., flow cytometry).

[0145] Radiometric techniques for ascertaining cell proliferation include, for example, [³H]-Thymidine, which is incorporated into newly synthesized DNA of living cells and frequently used to determine proliferation of cells. Chromium (⁵¹Cr)-release from dead cells can be quantitated by scintillation counting in order to quantitate cell viability.

[0146] Luminescent techniques for determining cell viability include, for example, the CellTiter-Glo luminescent cell viability assay (Promega Madison Wis.). This technique quantifies the amount of ATP present to determine the number of viable cells.

[0147] Commercially available kits for determining cell viability and cell proliferation, and therefore the extent of anti-cell proliferative activity of a compound of the invention, include, for example, Cell Proliferation Biotrak ELISA (Amersham Biosciences Piscataway, N.J.); the Guava ViaCount™ Assay, which provides rapid cell counts and viability determination based on differential uptake of fluorescent reagents (Guava Technologies, Hayward, Calif.); the CyQUANT® Cell Proliferation Assay Kit (Molecular Probes, Inc., Eugene, Oreg.); and the CytoLux Assay Kit (PerkinElmer Life Sciences Inc., Boston, Mass.). The DELFIA® Assay Kits (PerkinElmer Life Sciences Inc., Boston, Mass.) can determine cell proliferation and viability using a time-resolved fluorometric method. The Quantos™ Cell Proliferation Assay is a fluorescence-based assay that measures the fluorescence of a DNA-dye complex from lysed cells (Stratagene, La Jolla, Calif.). The CellTiter-Glo cell viability assay is a luminescent assay for measuring cell viability (Promega, Madison Wis.).

[0148] The term “contacting,” when used in reference to a composition such as a compound (e.g., a compound with a conserved motif having anti-cell proliferative activity), material, sample, or treatment, means a direct or indirect interaction between the compound and the other referenced entity. A particular example of direct interaction is binding. A particular example of an indirect interaction is where the compound acts upon an intermediary molecule, which in turn acts upon the referenced entity. Thus, for example, contacting a cell (e.g., that comprises a cell proliferative disorder) with a compound of the invention includes allowing the compound to bind to the cell, or allowing the compound to act upon an intermediary (e.g., receptor) that in turn acts upon the cell.

[0149] The invention also provides cell-free (e.g., in solution, in solid phase) and cell-based (e.g., in vitro or in vivo) methods of diagnosing a subject having or at increased probability of responding to treatment with an invention compound. In one embodiment, a method includes screening a subject for the presence of a cell (e.g., a cell of a cell proliferative disorder such as a neoplasia, tumor or cancer, or metastasis) that binds to the compound. The methods can be performed using a biological material or sample, for example, a biopsy of suspicious cells that may comprise or be indicative of neoplastic, tumor or cancer, or metastasis cells, tissue or organ. In one aspect, the biological material or sample is obtained from a mammalian subject (e.g., a human). The methods can also be performed in vivo, for example, in an animal.

[0150] Identifying, detecting, screening and diagnostic assays of the invention can be practiced by analysis of biological sample, such as suspect proliferating cells, for example, a cell of a cell proliferative disorder. Cells include hyperproliferating, immortalized, neoplastic, tumor and cancer cell lines and primary isolates derived from breast, lung, thyroid, head and neck, nasopharynx, nose or sinuses, brain, spine, adrenal gland, thyroid, lymph, gastrointestinal (mouth, esophagus, stomach, duodenum, ileum, jejunum (small intestine), colon, rectum), genito-urinary tract (uterus, ovary, cervix, bladder, testicle, penis, prostate), kidney, pancreas, adrenal gland, liver, bone, bone marrow, lymph, blood, muscle, skin, and the hematopoetic system, and metastasis or secondary sites.

[0151] The terms “assaying” and “measuring” and grammatical variations thereof are used interchangeably herein and refer to either qualitative or quantitative determinations, or both qualitative and quantitative determinations. When the terms are used in reference to activity (e.g., anti-cell proliferative or anticancer activity), any means of assessing the relative activity is contemplated, including the various methods set forth herein and known in the art.

[0152] In accordance with the invention, further provided are methods of producing compounds of the invention. In one embodiment, a method includes transforming a host cell with a nucleic acid encoding a compound and culturing the host cell under conditions that allow expression of the encoded compound, and optionally isolating or purifying the compound from the transformed cells.

[0153] Thus, there are also provided host cells that express compounds of the invention as set forth herein. In particular embodiments, a host cell transformed with a nucleic acid encoding a compound having a conserved motif which has anti-cell proliferative activity expresses the compound.

[0154] Unless otherwise defined, all technical and scientific terms used herein have the same meaning as commonly understood by one of ordinary skill in the art to which this invention relates. Although methods and materials similar or equivalent to those described herein can be used in the practice or testing of the invention, suitable methods and materials are described herein.

[0155] All publications, patents, Genbank accession numbers and other references cited herein are incorporated by reference in their entirety. In case of conflict, the present specification, including definitions, will control.

[0156] As used herein, singular forms “a”, “and,” and “the” include plural referents unless the context clearly indicates otherwise. Thus, for example, reference to a “compound” or a “peptide” or “mimetic” includes a plurality of compounds, peptides or mimetics, and reference to “a treatment or therapy” can include multiple simultaneous, consecutive or sequential treatments or therapies, and so forth.

[0157] As used herein, all numerical values or numerical ranges include whole integers within or encompassing such ranges and fractions of the values or the integers within or encompassing ranges unless the context clearly indicates otherwise. Thus, for example, reference to a range of 8 to 50, includes any numerical value or range within or encompassing such values, such as 8, 9, 10, 11, 12, 13, 14, 15, 16, 17, 18, 19, 20, 21, 22, 23, 24, 25, 26, 27, 28, 29, 30, etc.

[0158] The invention is generally disclosed herein using affirmative language to describe the numerous embodiments. The invention also specifically includes embodiments in which particular subject matter is excluded, in full or in part, such as substances or materials, method steps and conditions, protocols, procedures, assays or analysis. Thus, even though the invention is generally not expressed herein in terms of what the invention does not include, aspects that are not expressly included in the invention are nevertheless disclosed.

[0159] A number of embodiments of the invention have been described. Nevertheless, it will be understood that various modifications may be made without departing from the spirit and scope of the invention. Accordingly, the following examples are intended to illustrate but not limit the scope of invention described in the claims. For example, the following non-limiting examples include methods for ascertaining the anti-cell proliferative motif for activity, as well as describe a limited number of exemplary peptides and methods of use. These exemplary compositions and methods of treatment do not limit the invention, but provide general guidance to prepare and use the compounds, compositions and methods of the invention.

[0160] The studies herein should therefore not be construed as specifically limiting the invention and such variations of the invention, now known or later developed, which would be within the purview of one skilled in the art are considered to fall within the scope of the invention as described herein and hereinafter claimed. For example, in each case of an exemplary peptide shown below, a compound of the invention may be substituted for the exemplary peptide.

[0161] Trademarks used herein are examples only and reflect illustrative materials used at the time of the invention. The skilled artisan will recognize that variations in lot, manufacturing processes, and the like, are expected. Hence the examples, and the trademarks used in them are non-limiting, and they are not intended to be limiting, but are merely an illustration of how a skilled artisan may choose to perform one or more of the embodiments of the invention.

### EXAMPLES

### Example 1

[0162] This example describes a general method of producing peptides, proteins, fragments and mimetics that include an anti-cell proliferative (e.g., anticancer) motif.

[0163] Desired peptide fragments may be chemically synthesized. An alternative approach involves generating peptide fragments by enzymatic digestion, e.g., by treating the protein with an enzyme that cleaves proteins at sites defined by particular amino acid residues. Another alternative approach involves genetic methodology. Such techniques include expression of all or a part of the gene encoding the compound into a host cell such as mammalian cell, HeLa or Cos cells or E. coli. Such host cells can express full length or a fragment, for example, an scFv (see, e.g., Whitlow et al., In: Methods: A Companion to Methods in Enzymology 2:97 (1991), Bird et al, Science 242:423 (1988); and U.S. Pat. No. 4,946,778). For example, digesting a DNA encoding a peptide compound with a suitable restriction enzyme, and isolating the desired fragment and insert it into a vector for cell expression of the encoded peptide compound. Yet another suitable technique involves isolating and amplifying a DNA fragment encoding a desired polypeptide fragment, by polymerase chain reaction (PCR). Oligonucleotides that define the desired termini of the DNA fragment are employed at the 5′ and 3′ primers in the PCR.

[0164] In preparing a peptide, variations can be made using methods known in the art such as oligonucleotide-mediated (site-directed) mutagenesis, alanine scanning, and PCR mutagenesis. Site-directed mutagenesis [Carter et al., Nucl. Acids Res., 13:4331 (1986); Zoller et al., Nucl. Acids Res., 10:6487 (1987)], cassette mutagenesis [Wells et al., Gene, 34:315 (1985)], restriction selection mutagenesis [Wells et al., Philos. Trans. R. Soc. London SerA, 317:415 (1986)] or other known techniques can be performed on the cloned DNA to produce the variant DNA.

### Example 2

[0165] This example describes data indicating that two exemplary peptides with a conserved motif have anticancer cell activity. This example also includes a description of an exemplary cell based assay for ascertaining anti-cell proliferative activity.

[0166] Human Pancreatic Adenocarcinoma Cells (HPAC) cells were obtained from ATCC and propagated in Dulbecco's modified Eagle's medium and Ham's F12 medium (DME-F12) (1:1) containing 2.5 mM glutamine, 2 mg/mL insulin, 5 ug/mL transferrin, 1 ng/mL EGF (epidermal growth factor), plus 5 FBS (fetal bovine serum). Cell cultures were incubated at 37° C., 5% CO₂ in a 100% humidity atmosphere. The cells were routinely brought to confluence in T-flasks, rinsed with phosphate buffered saline (PBS), and treated with trypsin for 5 min at room temp. The trypsinized cells were rinsed from the plate with 10 mL medium and counted. Viability at subculturing was generally ≧95%.

[0167] Approximately 10,000 cells in 100 uL of medium were placed in each well of a 96-well plate and incubated over night. Peptides having the following sequences were used: Arg-15-Cys (RSSCAGAALSPLGAC; SEQ. ID NO:122); Pro-15-Val (PNEEAGAALSPLPEV; SEQ. ID NO:121); Ala-8-Leu (AGAALSPL; SEQ. ID NO:85); C-ANP 4-23 (RSSCFGGRIDRIGAC; SEQ. ID NO:124) and, VDL (EVVPPQVLSEPNEEAGAALSPLPEVPPWTGEVSPAQR; SEQ. ID NO:125). The peptides were dissolved in PBS and sterile filtered. The peptides were diluted into the cell culture medium to the following final concentrations: 1, 0.3, 0.1, 0.03, and 0.01 uM. Each peptide was tested in 5 replicate wells. The cultures were incubated for an additional 48 hours at 37° C.

[0168] The viability of the cells was determined using a Calbiochem Rapid Cell Proliferation Kit (catalog number QIA127). Ten uL of Calbiochem color reagent was added to each well and incubated for an additional 1.5 hours at 37° C. Optical densities were read at 450 nm using a Molecular Devices ThermoMax microplate reader. The plate template is shown in Table I (unlabeled wells contained cells but no peptide and were used as blanks). Results are presented in Table I, and are graphically illustrated in FIGS. 1 and 2.

TABLE I
Sample Locations in 96-Well Plates

| | | | | | | | | | | | |
|---|---|---|---|---|---|---|---|---|---|---|---|
| 1 | 2 | 3 | 4 | 5 | 6 | 7 | 8 | 9 | 10 | 11 | 12 |

Plate 1

| | | | | | | | | | | | | |
|---|---|---|---|---|---|---|---|---|---|---|---|---|
| A | Arg-15-Cys | 0.3 | 0.1 | 0.03 | 0.01 | | | 0.01 | 0.03 | 0.1 | 0.3 | 1 |
| | 1 | | | | | | | | | | | |
| B | | 0.01 | 1 | 0.3 | 0.1 | 0.03 | 0.03 | 0.1 | 0.3 | 1 | 0.01 | |
| C | Pro-15-Val | 0.1 | 0.3 | 1 | 0.01 | | | 0.01 | 1 | 0.1 | 0.3 | 0.03 |
| | 0.03 | | | | | | | | | | | |
| D | | 0.01 | 0.03 | 0.1 | 0.3 | 1 | 1 | 0.3 | 0.1 | 0.03 | 0.01 | |
| E | | Ala-8-Leu | 0.3 | 0.1 | 0.03 | 1 | 1 | 0.3 | 0.1 | 0.03 | 0.01 | |
| | | 0.01 | | | | | | | | | | |
| F | 0.3 | 0.1 | 0.03 | 1 | 0.01 | | | 0.01 | 1 | 0.3 | 1 | 0.01 |
| G | | 0.01 | 1 | 0.03 | 0.1 | 0.3 | 0.03 | 0.1 | 0.3 | 1 | 0.01 | |
| H | | | | | | | | 0.01 | 0.03 | 0.1 | 0.3 | 1 |

Plate 2

| | | | | | | | | | | | | |
|---|---|---|---|---|---|---|---|---|---|---|---|---|
| A | ANP | 0.3 | 0.1 | 0.03 | 0.01 | | | | | | | |
| | 1 | | | | | | | | | | | |
| B | | 0.01 | 1 | 0.3 | 0.1 | 0.03 | | | | | | |
| C | C-ANP | 0.1 | 0.3 | 1 | 0.01 | | | | | | | |
| | 0.03 | | | | | | | | | | | |
| D | | 0.01 | 0.03 | 0.1 | 0.3 | 1 | 1 | 0.3 | 0.1 | 0.03 | 0.01 | |
| E | | 0.01 | 0.03 | 0.1 | 0.3 | 1 | 1 | 0.3 | 0.1 | 0.03 | 0.01 | |
| F | | | | | | | | 0.01 | 1 | 0.3 | 0.1 | 0.03 |
| G | | | | | | | 0.03 | 0.1 | 0.3 | 1 | 0.01 | |
| H | | | | | | | | 0.03 | 0.03 | 0.1 | 0.3 | 1 |

Numerical values indicate peptide micromolar concentrations

TABLE II
Optical Densities in 96_Well Plate

| Arg-15-Cys | 1.0 μM | 0.3 μM | 0.1 μM | 0.03 μM | 0.01 μM | | 0.0 μM | | 0.0 μM |
|---|---|---|---|---|---|---|---|---|---|
| | 1.155 | 0.988 | 1.016 | 1.093 | 0.974 | | 1.029 | | 0.866 |
| | 1.005 | 0.957 | 0.917 | 0.894 | 0.920 | | 0.858 | | 0.988 |
| | 0.787 | 0.668 | 0.801 | 0.789 | 0.863 | | 1.135 | | 1.033 |
| | 0.944 | 0.913 | 0.990 | 0.955 | 0.840 | | 1.279 | | 1.003 |
| | 0.919 | 0.959 | 1.025 | 1.178 | 1.075 | | 1.255 | | 0.881 |
| | | | | | | | 0.999 | | 1.013 |
| Average | 0.962 | 0.897 | 0.950 | 0.982 | 0.934 | | 1.050 | | 0.854 |
| Std dev | 0.134 | 0.131 | 0.093 | 0.155 | 0.094 | | | | |
| | | | | | | | 0.946 | | 0.826 |
| Pro-15-Val | 1.0 μM | 0.3 μM | 0.1 μM | 0.03 μM | 0.01 μM | | 0.922 | | 0.971 |
| | 0.856 | 0.875 | 0.680 | 0.892 | 0.907 | | 0.967 | | 1.055 |
| | 0.752 | 0.817 | 0.895 | 0.765 | 0.905 | | 0.804 | | 0.871 |
| | 0.802 | 0.855 | 0.893 | 0.693 | 0.633 | | 0.817 | | 0.893 |
| | 1.083 | 1.024 | 1.156 | 1.151 | 1.209 | | 0.966 | | 0.774 |
| | 1.248 | 1.010 | 0.964 | 0.970 | 0.928 | | 0.977 | | 0.933 |
| | | | | | | | 0.892 | | 1.014 |
| Average | 0.948 | 0.916 | 0.918 | 0.894 | 0.916 | | 0.962 | | 0.873 |
| Std dev | 0.210 | 0.094 | 0.171 | 0.179 | 0.204 | | | | 0.966 |
| | | | | | | | 0.974 | | 1.010 |
| Ala-8-Leu | 1.0 μM | 0.3 μM | 0.1 μM | 0.03 μM | 0.01 μM | | 0.847 | | 0.926 |
| | 0.732 | 0.784 | 0.832 | 0.892 | 0.744 | | 0.562 | | 0.897 |
| | 1.216 | 0.802 | 1.006 | 0.937 | 0.878 | | 0.941 | | 0.868 |
| | 0.954 | 0.998 | 1.031 | 0.989 | 1.000 | | 1.310 | | 0.934 |
| | 0.834 | 1.357 | 0.910 | 0.921 | 0.892 | | | | 0.988 |
| | 1.189 | 1.070 | 1.174 | 1.139 | 1.169 | Plate 1 Avg. | 0.976 | | 0.965 |
| | | | | | | Std dev | 0.171 | | 0.820 |
| Average | 0.985 | 1.002 | 0.991 | 0.976 | 0.937 | | | | 0.878 |
| Std dev | 0.214 | 0.234 | 0.130 | 0.098 | 0.159 | | | | 0.945 |
| | | | | | | | | | 1.005 |
| ANP | 1.0 μM | 0.3 μM | 0.1 μM | 0.03 μM | 0.01 μM | | | | 0.932 |
| | 1.018 | 1.001 | 0.884 | 0.948 | 0.981 | | | | 0.922 |
| | 0.819 | 0.889 | 0.889 | 0.882 | 0.815 | | | | 0.744 |
| | 0.954 | 0.837 | 0.907 | 0.911 | 0.822 | | | | 0.936 |
| | 0.829 | 0.934 | 0.862 | 0.951 | 0.965 | | | | 0.892 |
| | 0.951 | 1.209 | 0.650 | 0.982 | 0.955 | | | | 0.895 |
| | | | | | | | | | 0.906 |
| Average | 0.914 | 0.974 | 0.838 | 0.935 | 0.908 | | | | 0.914 |
| Std dev | 0.087 | 0.145 | 0.107 | 0.039 | 0.082 | | | | 0.849 |
| | | | | | | | | | 0.836 |
| C-ANP | 1.0 μM | 0.3 μM | 0.1 μM | 0.03 μM | 0.01 μM | | | | 0.877 |
| | 0.865 | 0.840 | 0.758 | 0.905 | 0.877 | | | | 0.828 |
| | 0.925 | 0.928 | 1.027 | 0.882 | 0.971 | | | | 1.016 |
| | 0.900 | 1.035 | 0.983 | 0.981 | 0.953 | | | | 0.909 |
| | 0.955 | 0.975 | 0.960 | 0.948 | 0.932 | | | | 0.911 |
| | 0.981 | 0.932 | 0.982 | 0.943 | 0.958 | | | | 1.015 |
| | | | | | | | | | 0.998 |
| Average | 0.925 | 0.942 | 0.942 | 0.932 | 0.938 | | | | 0.964 |
| Std dev | 0.045 | 0.071 | 0.106 | 0.039 | 0.037 | | | | |
| | | | | | | | | Plate 2 Avg | 0.922 |
| | | | | | | | | Std dev | 0.071 |

### Example 3

[0169] This example describes activity of peptides having a conserved motif and conserved amino acids predicted to be functional in the motif. (Table III). This example also describes additional exemplary peptide sequences having a conserved motif predicted to have anti-cell proliferative (e.g., anticancer) activity (Table IV).

TABLE III
(SEQ. ID NOS: 126, 127, 125, 128, 129, 130, 124, 131, 121, 122, 132 and 85)

| | Anti- | | | | | | | | | | | | | | | | | | | |
|---|---|---|---|---|---|---|---|---|---|---|---|---|---|---|---|---|---|---|---|---|
| | cancer | | | | | | | | | | | | | | | | | | | |
| Peptide | Activity | 1 | 2 | 3 | 4 | 5 | 6 | 7 | 8 | 9 | 10 | 11 | 12 | 13 | 14 | 15 | 16 | 17 | 18 | 19 |
| ANP | — | | | | | | | S | L | R | R | S | S | C | F | G | G | R | M | D |
| CNP | — | | | | | | | | | | | | | | | F | G | L | K | L |
| KT-220 | — | E | V | V | P | P | Q | V | L | S | E | P | N | E | E | A | G | A | A | L |
| (VDL) | | | | | | | | | | | | | | | | | | | | |
| LANP | — | | | | | | | | | | | | | | | F | K | N | L | L |
| KP | — | | | | | | | | | | | | | | | L | K | S | K | L |
| BNP | — | | | | | | | | | | | | | | | F | G | K | R | M |
| C-ANP 4-23 | — | | | | | | | | | | | R | S | S | C | F | G | G | R | I |
| Conserved | | | | | | | | | | | | | | | F, A, | G, | N, S, | Any | L, M | S, D, |
| Amino | | | | | | | | | | | | | | | L | K | G, L, | | | R |
| Acids | | | | | | | | | | | | | | | | | A | | | |
| Peptides | | | | | | | | | | | | | | | | | | | | |
| Pro-15-Val | — | | | | | | | | | | | P | N | E | E | A | G | A | A | L |
| Arg-15-Cys | — | | | | | | | | | | | R | S | S | C | A | G | A | A | L |
| 3 | N/D | | | | | | | | | | | R | S | S | C | A | G | K | A | L |
| Ala-8-Leu | | | | | | | | | | | | | | | | A | G | A | A | L |
| | | Peptide | 20 | 21 | 22 | 23 | 24 | 25 | 26 | 27 | 28 | 29 | 30 | 31 | 32 | 33 | 34 | 35 | 36 | 37 |
| | | ANP | R | I | G | A | Q | S | G | L | G | C | N | S | F | R | Y | | | |
| | | CNP | D | R | I | | | | | | | | | | | | | | | |
| | | KT-220 | S | P | L | P | E | V | P | P | W | T | G | E | V | S | P | A | Q | R |
| | | (VDL) | | | | | | | | | | | | | | | | | | |
| | | LANP | D | H | L | | | | | | | | | | | | | | | |
| | | KP | R | A | L | | | | | | | | | | | | | | | |
| | | BNP | D | R | I | | | | | | | | | | | | | | | |
| | | C-ANP 4-23 | D | R | I | G | A | C | | | | | | | | | | | | |
| | | Conserved | Any | I, L | | | | | | | | | | | | | | | | |
| | | Amino | | | | | | | | | | | | | | | | | | |
| | | Acids | | | | | | | | | | | | | | | | | | |
| | | Peptides | | | | | | | | | | | | | | | | | | |
| | | Pro-15-Val | S | P | L | P | E | V | | | | | | | | | | | | |
| | | Arg-15-Cys | S | P | L | G | A | C | | | | | | | | | | | | |
| | | 3 | S | P | L | G | A | C | | | | | | | | | | | | |
| | | Ala-8-Leu | S | P | L | | | | | | | | | | | | | | | |

[0170] Positions 15 to 21 in Table III correspond to Res1-Res8 of the conserved motif. Conserved amino acids at each of Residues 1-8 include, for example, the following: (15) F, A, L; (16) G, K; (17) N, S, G, L, A; (18) Any; (19) L, M; (20) S, D, R; (21) Any; (22) I, L. Conserved amino acids at each of Residues 1-8 include, for example, Rest: a hydrophobic, non-polar, non-ionizable residue; Res2 a non-hydrophobic (amphiphillic or hydrophilic) residue; Res3, a non-ionizable residue or a residue with a small side chain (0-2 carbon backbone, with 3 and 4 carbons weaker); Res4, Any residue; Res5, a hydrophobic, non-polar, non-ionizable or aliphatic residue; Res6, a polar residue; Res7, Any residue; and Res8, a hydrophobic, non-polar, non-ionizable or aliphatic residue.

[0171] Notations “Res 1, Res 2” etc., herein refer by single letter abbreviation the amino acid in the exemplary peptide 8-mer. “Activity” can be determined by a cell proliferative assay, such as an assay described herein or known to one of skill in the art. Of course, peptides exemplified in Table IV can include the conserved motif peptide as part of a larger protein. The SEQ ID NO is the same as the peptide number.

TABLE IV

| SEQ | | | | | | | | | |
|---|---|---|---|---|---|---|---|---|---|
| ID | Res | Res | Res | Res | Res | Res | Res | Res | Predicted |
| NO | 1 | 2 | 3 | 4 | 5 | 6 | 7 | 8 | Activity |
| 1 | F | G | N | A | L | S | P | I | + |
| 2 | F | G | S | R | L | D | S | I | + |
| 3 | F | G | G | N | L | R | T | I | + |
| 4 | F | G | L | D | L | D | W | I | + |
| 5 | F | G | A | C | L | R | Y | I | + |
| 6 | F | G | N | E | M | S | V | I | + |
| 7 | F | G | S | Q | M | D | A | I | + |
| 8 | F | G | G | G | M | R | R | I | + |
| 9 | F | G | L | H | M | S | N | I | + |
| 10 | F | G | A | I | M | D | D | I | + |
| 11 | F | K | N | L | L | R | C | I | + |
| 12 | F | K | S | K | L | S | E | I | + |
| 13 | F | K | G | M | L | D | Q | I | + |
| 14 | F | K | L | G | L | R | G | I | + |
| 15 | F | K | A | F | L | S | H | I | + |
| 16 | F | K | N | P | M | D | I | I | + |
| 17 | F | K | S | S | M | R | L | I | + |
| 18 | F | K | G | T | M | S | K | I | + |
| 19 | F | K | L | W | M | D | M | I | + |
| 20 | F | K | A | Y | M | R | G | I | + |
| 21 | A | G | N | V | L | S | F | I | + |
| 22 | A | G | S | A | L | D | P | I | + |
| 23 | A | G | G | R | L | R | S | I | + |
| 24 | A | G | L | N | L | S | T | I | + |
| 25 | A | G | A | D | L | D | W | I | + |
| 26 | A | G | N | C | M | R | Y | I | + |
| 27 | A | G | S | E | M | S | V | I | + |
| 28 | A | G | G | Q | M | D | A | I | + |
| 29 | A | G | L | G | M | R | R | I | + |
| 30 | A | G | A | H | M | S | N | I | + |
| 31 | A | K | N | I | L | D | D | I | + |
| 32 | A | K | S | L | L | R | C | I | + |
| 33 | A | K | G | K | L | S | E | I | + |
| 34 | A | K | L | M | L | D | Q | I | + |
| 35 | A | K | A | G | L | R | G | I | + |
| 36 | A | K | N | F | M | S | H | I | + |
| 37 | A | K | S | P | M | D | I | I | + |
| 38 | A | K | G | S | M | R | L | I | + |
| 39 | A | K | L | T | M | S | K | I | + |
| 40 | A | K | A | W | M | D | M | I | + |
| 41 | L | G | N | Y | L | R | G | I | + |
| 42 | L | G | S | V | L | S | F | I | + |
| 43 | L | G | G | A | L | D | P | I | + |
| 44 | L | G | L | R | L | R | S | I | + |
| 45 | L | G | A | N | L | S | T | I | + |
| 46 | L | G | N | D | M | D | W | I | + |
| 47 | L | G | S | C | M | R | Y | I | + |
| 48 | L | G | G | E | M | S | V | I | + |
| 49 | L | G | L | Q | M | D | A | I | + |
| 50 | L | G | A | G | M | R | R | I | + |
| 51 | L | K | N | H | L | S | N | I | + |
| 52 | L | K | S | I | L | D | D | I | + |
| 53 | L | K | G | L | L | R | C | I | + |
| 54 | L | K | L | K | L | S | E | I | + |
| 55 | L | K | A | M | L | D | Q | I | + |
| 56 | L | K | N | G | M | R | G | I | + |
| 57 | L | K | S | F | M | S | H | I | + |
| 58 | L | K | G | P | M | D | I | I | + |
| 59 | L | K | L | S | M | R | L | L | + |
| 60 | L | K | A | T | M | S | K | L | + |
| 61 | F | G | N | W | L | S | M | L | + |
| 62 | F | G | S | Y | L | D | G | L | + |
| 63 | F | G | G | V | L | R | F | L | + |
| 64 | F | G | L | A | L | D | P | L | + |
| 65 | F | G | A | R | L | R | S | L | + |
| 66 | F | G | N | N | M | S | T | L | + |
| 67 | F | G | S | D | M | D | W | L | + |
| 68 | F | G | G | R | M | D | R | I | + |
| 69 | F | G | L | E | M | S | V | L | + |
| 70 | F | G | A | Q | M | D | A | L | + |
| 71 | F | K | N | G | L | R | R | L | + |
| 72 | F | K | S | H | L | S | N | L | + |
| 73 | F | K | G | I | L | D | D | L | + |
| 74 | F | K | L | L | L | R | C | L | + |
| 75 | F | K | A | K | L | S | E | L | + |
| 76 | F | K | N | M | M | D | Q | L | + |
| 77 | F | K | S | G | M | R | G | L | + |
| 78 | F | K | G | F | M | S | H | L | + |
| 79 | F | K | L | P | M | D | I | L | + |
| 80 | F | K | A | S | M | R | L | L | + |
| 81 | A | G | N | T | L | S | K | L | + |
| 82 | A | G | S | W | L | D | M | L | + |
| 83 | A | G | G | Y | L | R | G | L | + |
| 84 | A | G | L | V | L | S | F | L | + |
| 85 | A | G | A | A | L | S | P | L | + |
| 86 | A | G | N | R | M | R | S | L | + |
| 87 | A | G | S | N | M | S | T | L | + |
| 88 | A | G | G | D | M | D | W | L | + |
| 89 | A | G | L | C | M | R | Y | L | + |
| 90 | A | G | A | E | M | S | V | L | + |
| 91 | A | K | N | Q | L | D | A | L | + |
| 92 | A | K | S | G | L | R | R | L | + |
| 92 | A | K | G | H | L | S | N | L | + |
| 94 | A | K | L | I | L | D | D | L | + |
| 95 | A | K | A | L | L | R | C | L | + |
| 96 | A | K | N | K | M | S | E | L | + |
| 97 | A | K | S | M | M | D | Q | L | + |
| 98 | A | K | G | G | M | R | G | L | + |
| 99 | A | K | L | F | M | S | H | L | + |
| 100 | A | K | A | P | M | D | I | L | + |
| 101 | L | G | N | S | L | R | L | L | + |
| 102 | L | G | S | T | L | S | K | L | + |
| 103 | L | G | G | W | L | D | M | L | + |
| 104 | L | G | L | Y | L | R | G | L | + |
| 105 | L | G | A | V | L | S | F | L | + |
| 106 | L | G | N | A | M | D | P | L | + |
| 107 | L | G | S | R | M | R | S | L | + |
| 108 | L | G | G | N | M | S | T | L | + |
| 109 | L | G | L | D | M | D | W | L | + |
| 110 | L | G | A | C | M | R | Y | L | + |
| 111 | L | K | N | E | L | S | V | L | + |
| 112 | L | K | S | Q | L | D | A | L | + |
| 113 | L | K | G | G | L | R | R | L | + |
| 114 | L | K | L | H | L | S | N | L | + |
| 115 | L | K | A | I | L | D | D | L | + |
| 116 | L | K | N | L | M | R | C | L | + |
| 117 | L | K | S | K | M | S | E | L | + |
| 118 | L | K | G | M | M | D | Q | L | + |
| 119 | L | K | L | G | M | R | G | L | + |
| 120 | L | K | A | F | M | S | H | L | + |

[0172] Each of these exemplary peptides can be analyzed in vitro, ex vivo, and in vivo for anti-cell proliferative activity using an assay, such as a cell based in vitro assay described in Examples 1 or 4.

### Example 4

[0173] This example includes a description of another exemplary cell based assay to determine anti-cell proliferative activity.

[0174] Human ovarian carcinoma cells are cultured, and the peptides tested according to methods previously described [Vesely, et al, Cancer Ther. 5:97-104 (2007)]. To investigate whether the peptides inhibit DNA synthesis, and indication of cell proliferation, bromodeoxyuridine (BrdU) incorporation into the human ovarian carcinoma cells was utilized as previously described. [Vesely, D. L. Eur J Clin Invest. 38(8) 562:(2008) and references therein). BrdU was from BD Bioscience, San Jose, Calif. After 24 hours in culture with 1 μM of vessel dilator VDL, or with no peptide hormone (i.e., control), BrdU in a final concentration of 10 μM in the cell culture medium was added for 45 minutes, which is the time in which the cells are in the logarithmic phase of cell proliferation. In addition, if the addition of the peptide of the invention significantly decreased the number of ovarian cancer cells in 24 hours, compared to the control.

### Example 5

[0175] This example includes a description of testing of ANPs for anti-cell proliferative activity using NPR affinity as a proxy.

[0176] Although not wishing to be bound by theory, the relative potencies (anti-cell proliferative activity) of NP's are predicted to be related to binding affinities at NPRs [Vesely, D. L., Eur J Clin Invest. 38(8) 562:(2008) and references therein]. For example, the greater potency observed for ANP than CNP correlates with ANP's higher binding affinities at NPRA and NPRC, whereas the greater potency of CNP than BNP agrees with CNP having a higher binding affinity than BNP specifically at NPRC [Vesely, D. L., Eur J Clin Invest. 38(8) 562:(2008) and references therein].

[0177] The receptor selectivity of the natriuretic peptide family (ANP, BNP, CNP) using the homologous assay system described by Suga, et al., Endocrinol. 130:229-239 (1992). The rank order of binding affinity for the C-receptor follow the trends of the cell based assay of Example 4.

[0178] Thus, binding affinities at NPRs, such as NPRC may be a good proxy for anti-cell proliferative (anticancer) activity.

### Example 6

[0179] This example includes a description of peptidomimetics having the conserved motif.

[0180] Literature compounds, which appear to be peptidomimetics of the anti-cell proliferative (e.g., anticancer) motif are assayed for activity (e.g., Examples 1 and 4) or are assayed for NPR binding (e.g., Example 5), and demonstrate binding. Predicted peptidomimetics include:

[chemical structure]

### Example 7

[0181] This example includes a description of testing with an in vivo Xenograft model.

[0182] The efficacy in a xenograft model, of the natriuretic peptide family (CNP, VDL, LAND, KP, BNP), can employ the assay described by Vesely, D. L., In Vivo 21:445 (2007) in order to demonstrate anticancer activity.

### Example 8

[0183] This example includes a description of various acceptable routes of systemic, regional or local, administration.

[0184] For administration by injection, an injectable solution can be prepared by conventional methods using 10.0 ml of physiological saline solution and 7.0 mg of a peptide adjusted to pH=7.4. One injection, one time daily for 4 days, can be administered to patients weighing approximately 70 kilogram.

[0185] For administration by infusion, an intravenous infusion composition can be prepared by conventional methods using 1000.0 ml of physiological saline solution and 400.0 mg of the peptide of Example 1 adjusted to pH=7.4. A one hour infusion, one time daily for 4 weeks, can be administered to a patient weighing approximately 58 kilograms.

[0186] For continuous administration, such as administration by Subcutaneous Injection via a pump, an injectable solution can be prepared by conventional methods using 1000.0 ml of physiological saline solution and 400.0 mg of a peptide adjusted to pH=7.4. The patient has a pump implanted to dispense the composition over time, as described in Vesely, D. L., In vivo 21:445-452 (2007). The implanted continuous infusion pump dispenses the composition at intervals, thrice daily for up to 8 weeks, to a patient weighing approximately 47 kilograms.

The application's sequence listing, which the Patent Office published only in electronic form, follows.

SEQUENCE LISTING (1916 sequences)

SEQ ID NO: 1 - protein, 8 aa, Artificial Sequence
  Description of Artificial Sequence: Synthetic Peptide
FGNALSPI

SEQ ID NO: 2 - protein, 8 aa, Artificial Sequence
  Description of Artificial Sequence: Synthetic Peptide
FGSRLDSI

SEQ ID NO: 3 - protein, 8 aa, Artificial Sequence
  Description of Artificial Sequence: Synthetic Peptide
FGGNLRTI

SEQ ID NO: 4 - protein, 8 aa, Artificial Sequence
  Description of Artificial Sequence: Synthetic Peptide
FGLDLDWI

SEQ ID NO: 5 - protein, 8 aa, Artificial Sequence
  Description of Artificial Sequence: Synthetic Peptide
FGACLRYI

SEQ ID NO: 6 - protein, 8 aa, Artificial Sequence
  Description of Artificial Sequence: Synthetic Peptide
FGNEMSVI

SEQ ID NO: 7 - protein, 8 aa, Artificial Sequence
  Description of Artificial Sequence: Synthetic Peptide
FGSQMDAI

SEQ ID NO: 8 - protein, 8 aa, Artificial Sequence
  Description of Artificial Sequence: Synthetic Peptide
FGGGMRRI

SEQ ID NO: 9 - protein, 8 aa, Artificial Sequence
  Description of Artificial Sequence: Synthetic Peptide
FGLHMSNI

SEQ ID NO: 10 - protein, 8 aa, Artificial Sequence
  Description of Artificial Sequence: Synthetic Peptide
FGAIMDDI

SEQ ID NO: 11 - protein, 8 aa, Artificial Sequence
  Description of Artificial Sequence: Synthetic Peptide
FKNLLRCI

SEQ ID NO: 12 - protein, 8 aa, Artificial Sequence
  Description of Artificial Sequence: Synthetic Peptide
FKSKLSEI

SEQ ID NO: 13 - protein, 8 aa, Artificial Sequence
  Description of Artificial Sequence: Synthetic Peptide
FKGMLDQI

SEQ ID NO: 14 - protein, 8 aa, Artificial Sequence
  Description of Artificial Sequence: Synthetic Peptide
FKLGLRGI

SEQ ID NO: 15 - protein, 8 aa, Artificial Sequence
  Description of Artificial Sequence: Synthetic Peptide
FKAFLSHI

SEQ ID NO: 16 - protein, 8 aa, Artificial Sequence
  Description of Artificial Sequence: Synthetic Peptide
FKNPMDII

SEQ ID NO: 17 - protein, 8 aa, Artificial Sequence
  Description of Artificial Sequence: Synthetic Peptide
FKSSMRLI

SEQ ID NO: 18 - protein, 8 aa, Artificial Sequence
  Description of Artificial Sequence: Synthetic Peptide
FKGTMSKI

SEQ ID NO: 19 - protein, 8 aa, Artificial Sequence
  Description of Artificial Sequence: Synthetic Peptide
FKLWMDMI

SEQ ID NO: 20 - protein, 8 aa, Artificial Sequence
  Description of Artificial Sequence: Synthetic Peptide
FKAYMRGI

SEQ ID NO: 21 - protein, 8 aa, Artificial Sequence
  Description of Artificial Sequence: Synthetic Peptide
AGNVLSFI

SEQ ID NO: 22 - protein, 8 aa, Artificial Sequence
  Description of Artificial Sequence: Synthetic Peptide
AGSALDPI

SEQ ID NO: 23 - protein, 8 aa, Artificial Sequence
  Description of Artificial Sequence: Synthetic Peptide
AGGRLRSI

SEQ ID NO: 24 - protein, 8 aa, Artificial Sequence
  Description of Artificial Sequence: Synthetic Peptide
AGLNLSTI

SEQ ID NO: 25 - protein, 8 aa, Artificial Sequence
  Description of Artificial Sequence: Synthetic Peptide
AGADLDWI

SEQ ID NO: 26 - protein, 8 aa, Artificial Sequence
  Description of Artificial Sequence: Synthetic Peptide
AGNCMRYI

SEQ ID NO: 27 - protein, 8 aa, Artificial Sequence
  Description of Artificial Sequence: Synthetic Peptide
AGSEMSVI

SEQ ID NO: 28 - protein, 8 aa, Artificial Sequence
  Description of Artificial Sequence: Synthetic Peptide
AGGQMDAI

SEQ ID NO: 29 - protein, 8 aa, Artificial Sequence
  Description of Artificial Sequence: Synthetic Peptide
AGLGMRRI

SEQ ID NO: 30 - protein, 8 aa, Artificial Sequence
  Description of Artificial Sequence: Synthetic Peptide
AGAHMSNI

SEQ ID NO: 31 - protein, 8 aa, Artificial Sequence
  Description of Artificial Sequence: Synthetic Peptide
AKNILDDI

SEQ ID NO: 32 - protein, 8 aa, Artificial Sequence
  Description of Artificial Sequence: Synthetic Peptide
AKSLLRCI

SEQ ID NO: 33 - protein, 8 aa, Artificial Sequence
  Description of Artificial Sequence: Synthetic Peptide
AKGKLSEI

SEQ ID NO: 34 - protein, 8 aa, Artificial Sequence
  Description of Artificial Sequence: Synthetic Peptide
AKLMLDQI

SEQ ID NO: 35 - protein, 8 aa, Artificial Sequence
  Description of Artificial Sequence: Synthetic Peptide
AKAGLRGI

SEQ ID NO: 36 - protein, 8 aa, Artificial Sequence
  Description of Artificial Sequence: Synthetic Peptide
AKNFMSHI

SEQ ID NO: 37 - protein, 8 aa, Artificial Sequence
  Description of Artificial Sequence: Synthetic Peptide
AKSPMDII

SEQ ID NO: 38 - protein, 8 aa, Artificial Sequence
  Description of Artificial Sequence: Synthetic Peptide
AKGSMRLI

SEQ ID NO: 39 - protein, 8 aa, Artificial Sequence
  Description of Artificial Sequence: Synthetic Peptide
AKLTMSKI

SEQ ID NO: 40 - protein, 8 aa, Artificial Sequence
  Description of Artificial Sequence: Synthetic Peptide
AKAWMDMI

SEQ ID NO: 41 - protein, 8 aa, Artificial Sequence
  Description of Artificial Sequence: Synthetic Peptide
LGNYLRGI

SEQ ID NO: 42 - protein, 8 aa, Artificial Sequence
  Description of Artificial Sequence: Synthetic Peptide
LGSVLSFI

SEQ ID NO: 43 - protein, 8 aa, Artificial Sequence
  Description of Artificial Sequence: Synthetic Peptide
LGGALDPI

SEQ ID NO: 44 - protein, 8 aa, Artificial Sequence
  Description of Artificial Sequence: Synthetic Peptide
LGLRLRSI

SEQ ID NO: 45 - protein, 8 aa, Artificial Sequence
  Description of Artificial Sequence: Synthetic Peptide
LGANLSTI

SEQ ID NO: 46 - protein, 8 aa, Artificial Sequence
  Description of Artificial Sequence: Synthetic Peptide
LGNDMDWI

SEQ ID NO: 47 - protein, 8 aa, Artificial Sequence
  Description of Artificial Sequence: Synthetic Peptide
LGSCMRYI

SEQ ID NO: 48 - protein, 8 aa, Artificial Sequence
  Description of Artificial Sequence: Synthetic Peptide
LGGEMSVI

SEQ ID NO: 49 - protein, 8 aa, Artificial Sequence
  Description of Artificial Sequence: Synthetic Peptide
LGLQMDAI

SEQ ID NO: 50 - protein, 8 aa, Artificial Sequence
  Description of Artificial Sequence: Synthetic Peptide
LGAGMRRI

SEQ ID NO: 51 - protein, 8 aa, Artificial Sequence
  Description of Artificial Sequence: Synthetic Peptide
LKNHLSNI

SEQ ID NO: 52 - protein, 8 aa, Artificial Sequence
  Description of Artificial Sequence: Synthetic Peptide
LKSILDDI

SEQ ID NO: 53 - protein, 8 aa, Artificial Sequence
  Description of Artificial Sequence: Synthetic Peptide
LKGLLRCI

SEQ ID NO: 54 - protein, 8 aa, Artificial Sequence
  Description of Artificial Sequence: Synthetic Peptide
LKLKLSEI

SEQ ID NO: 55 - protein, 8 aa, Artificial Sequence
  Description of Artificial Sequence: Synthetic Peptide
LKAMLDQI

SEQ ID NO: 56 - protein, 8 aa, Artificial Sequence
  Description of Artificial Sequence: Synthetic Peptide
LKNGMRGI

SEQ ID NO: 57 - protein, 8 aa, Artificial Sequence
  Description of Artificial Sequence: Synthetic Peptide
LKSFMSHI

SEQ ID NO: 58 - protein, 8 aa, Artificial Sequence
  Description of Artificial Sequence: Synthetic Peptide
LKGPMDII

SEQ ID NO: 59 - protein, 8 aa, Artificial Sequence
  Description of Artificial Sequence: Synthetic Peptide
LKLSMRLL

SEQ ID NO: 60 - protein, 8 aa, Artificial Sequence
  Description of Artificial Sequence: Synthetic Peptide
LKATMSKL

SEQ ID NO: 61 - protein, 8 aa, Artificial Sequence
  Description of Artificial Sequence: Synthetic Peptide
FGNWLSML

SEQ ID NO: 62 - protein, 8 aa, Artificial Sequence
  Description of Artificial Sequence: Synthetic Peptide
FGSYLDGL

SEQ ID NO: 63 - protein, 8 aa, Artificial Sequence
  Description of Artificial Sequence: Synthetic Peptide
FGGVLRFL

SEQ ID NO: 64 - protein, 8 aa, Artificial Sequence
  Description of Artificial Sequence: Synthetic Peptide
FGLALDPL

SEQ ID NO: 65 - protein, 8 aa, Artificial Sequence
  Description of Artificial Sequence: Synthetic Peptide
FGARLRSL

SEQ ID NO: 66 - protein, 8 aa, Artificial Sequence
  Description of Artificial Sequence: Synthetic Peptide
FGNNMSTL

SEQ ID NO: 67 - protein, 8 aa, Artificial Sequence
  Description of Artificial Sequence: Synthetic Peptide
FGSDMDWL

SEQ ID NO: 68 - protein, 8 aa, Artificial Sequence
  Description of Artificial Sequence: Synthetic Peptide
FGGRMDRI

SEQ ID NO: 69 - protein, 8 aa, Artificial Sequence
  Description of Artificial Sequence: Synthetic Peptide
FGLEMSVL

SEQ ID NO: 70 - protein, 8 aa, Artificial Sequence
  Description of Artificial Sequence: Synthetic Peptide
FGAQMDAL

SEQ ID NO: 71 - protein, 8 aa, Artificial Sequence
  Description of Artificial Sequence: Synthetic Peptide
FKNGLRRL

SEQ ID NO: 72 - protein, 8 aa, Artificial Sequence
  Description of Artificial Sequence: Synthetic Peptide
FKSHLSNL

SEQ ID NO: 73 - protein, 8 aa, Artificial Sequence
  Description of Artificial Sequence: Synthetic Peptide
FKGILDDL

SEQ ID NO: 74 - protein, 8 aa, Artificial Sequence
  Description of Artificial Sequence: Synthetic Peptide
FKLLLRCL

SEQ ID NO: 75 - protein, 8 aa, Artificial Sequence
  Description of Artificial Sequence: Synthetic Peptide
FKAKLSEL

SEQ ID NO: 76 - protein, 8 aa, Artificial Sequence
  Description of Artificial Sequence: Synthetic Peptide
FKNMMDQL

SEQ ID NO: 77 - protein, 8 aa, Artificial Sequence
  Description of Artificial Sequence: Synthetic Peptide
FKSGMRGL

SEQ ID NO: 78 - protein, 8 aa, Artificial Sequence
  Description of Artificial Sequence: Synthetic Peptide
FKGFMSHL

SEQ ID NO: 79 - protein, 8 aa, Artificial Sequence
  Description of Artificial Sequence: Synthetic Peptide
FKLPMDIL

SEQ ID NO: 80 - protein, 8 aa, Artificial Sequence
  Description of Artificial Sequence: Synthetic Peptide
FKASMRLL

SEQ ID NO: 81 - protein, 8 aa, Artificial Sequence
  Description of Artificial Sequence: Synthetic Peptide
AGNTLSKL

SEQ ID NO: 82 - protein, 8 aa, Artificial Sequence
  Description of Artificial Sequence: Synthetic Peptide
AGSWLDML

SEQ ID NO: 83 - protein, 8 aa, Artificial Sequence
  Description of Artificial Sequence: Synthetic Peptide
AGGYLRGL

SEQ ID NO: 84 - protein, 8 aa, Artificial Sequence
  Description of Artificial Sequence: Synthetic Peptide
AGLVLSFL

SEQ ID NO: 85 - protein, 8 aa, Artificial Sequence
  Description of Artificial Sequence: Synthetic Peptide
AGAALSPL

SEQ ID NO: 86 - protein, 8 aa, Artificial Sequence
  Description of Artificial Sequence: Synthetic Peptide
AGNRMRSL

SEQ ID NO: 87 - protein, 8 aa, Artificial Sequence
  Description of Artificial Sequence: Synthetic Peptide
AGSNMSTL

SEQ ID NO: 88 - protein, 8 aa, Artificial Sequence
  Description of Artificial Sequence: Synthetic Peptide
AGGDMDWL

SEQ ID NO: 89 - protein, 8 aa, Artificial Sequence
  Description of Artificial Sequence: Synthetic Peptide
AGLCMRYL

SEQ ID NO: 90 - protein, 8 aa, Artificial Sequence
  Description of Artificial Sequence: Synthetic Peptide
AGAEMSVL

SEQ ID NO: 91 - protein, 8 aa, Artificial Sequence
  Description of Artificial Sequence: Synthetic Peptide
AKNQLDAL

SEQ ID NO: 92 - protein, 8 aa, Artificial Sequence
  Description of Artificial Sequence: Synthetic Peptide
AKSGLRRL

SEQ ID NO: 93 - protein, 8 aa, Artificial Sequence
  Description of Artificial Sequence: Synthetic Peptide
AKGHLSNL

SEQ ID NO: 94 - protein, 8 aa, Artificial Sequence
  Description of Artificial Sequence: Synthetic Peptide
AKLILDDL

SEQ ID NO: 95 - protein, 8 aa, Artificial Sequence
  Description of Artificial Sequence: Synthetic Peptide
AKALLRCL

SEQ ID NO: 96 - protein, 8 aa, Artificial Sequence
  Description of Artificial Sequence: Synthetic Peptide
AKNKMSEL

SEQ ID NO: 97 - protein, 8 aa, Artificial Sequence
  Description of Artificial Sequence: Synthetic Peptide
AKSMMDQL

SEQ ID NO: 98 - protein, 8 aa, Artificial Sequence
  Description of Artificial Sequence: Synthetic Peptide
AKGGMRGL

SEQ ID NO: 99 - protein, 8 aa, Artificial Sequence
  Description of Artificial Sequence: Synthetic Peptide
AKLFMSHL

SEQ ID NO: 100 - protein, 8 aa, Artificial Sequence
  Description of Artificial Sequence: Synthetic Peptide
AKAPMDIL

SEQ ID NO: 101 - protein, 8 aa, Artificial Sequence
  Description of Artificial Sequence: Synthetic Peptide
LGNSLRLL

SEQ ID NO: 102 - protein, 8 aa, Artificial Sequence
  Description of Artificial Sequence: Synthetic Peptide
LGSTLSKL

SEQ ID NO: 103 - protein, 8 aa, Artificial Sequence
  Description of Artificial Sequence: Synthetic Peptide
LGGWLDML

SEQ ID NO: 104 - protein, 8 aa, Artificial Sequence
  Description of Artificial Sequence: Synthetic Peptide
LGLYLRGL

SEQ ID NO: 105 - protein, 8 aa, Artificial Sequence
  Description of Artificial Sequence: Synthetic Peptide
LGAVLSFL

SEQ ID NO: 106 - protein, 8 aa, Artificial Sequence
  Description of Artificial Sequence: Synthetic Peptide
LGNAMDPL

SEQ ID NO: 107 - protein, 8 aa, Artificial Sequence
  Description of Artificial Sequence: Synthetic Peptide
LGSRMRSL

SEQ ID NO: 108 - protein, 8 aa, Artificial Sequence
  Description of Artificial Sequence: Synthetic Peptide
LGGNMSTL

SEQ ID NO: 109 - protein, 8 aa, Artificial Sequence
  Description of Artificial Sequence: Synthetic Peptide
LGLDMDWL

SEQ ID NO: 110 - protein, 8 aa, Artificial Sequence
  Description of Artificial Sequence: Synthetic Peptide
LGACMRYL

SEQ ID NO: 111 - protein, 8 aa, Artificial Sequence
  Description of Artificial Sequence: Synthetic Peptide
LKNELSVL

SEQ ID NO: 112 - protein, 8 aa, Artificial Sequence
  Description of Artificial Sequence: Synthetic Peptide
LKSQLDAL

SEQ ID NO: 113 - protein, 8 aa, Artificial Sequence
  Description of Artificial Sequence: Synthetic Peptide
LKGGLRRL

SEQ ID NO: 114 - protein, 8 aa, Artificial Sequence
  Description of Artificial Sequence: Synthetic Peptide
LKLHLSNL

SEQ ID NO: 115 - protein, 8 aa, Artificial Sequence
  Description of Artificial Sequence: Synthetic Peptide
LKAILDDL

SEQ ID NO: 116 - protein, 8 aa, Artificial Sequence
  Description of Artificial Sequence: Synthetic Peptide
LKNLMRCL

SEQ ID NO: 117 - protein, 8 aa, Artificial Sequence
  Description of Artificial Sequence: Synthetic Peptide
LKSKMSEL

SEQ ID NO: 118 - protein, 8 aa, Artificial Sequence
  Description of Artificial Sequence: Synthetic Peptide
LKGMMDQL

SEQ ID NO: 119 - protein, 8 aa, Artificial Sequence
  Description of Artificial Sequence: Synthetic Peptide
LKLGMRGL

SEQ ID NO: 120 - protein, 8 aa, Artificial Sequence
  Description of Artificial Sequence: Synthetic Peptide
LKAFMSHL

SEQ ID NO: 121 - protein, 15 aa, Artificial Sequence
  Description of Artificial Sequence: Synthetic Peptide
PNEEAGAALSPLPEV

SEQ ID NO: 122 - protein, 15 aa, Artificial Sequence
  Description of Artificial Sequence: Synthetic Peptide
RSSCAGAALSPLGAC

SEQ ID NO: 123 - protein, 8 aa, Artificial Sequence
  Description of Artificial Sequence: Synthetic Peptide
AGAKLSPL

SEQ ID NO: 124 - protein, 15 aa, Artificial Sequence
  Description of Artificial Sequence: Synthetic Peptide
RSSCFGGRIDRIGAC

SEQ ID NO: 125 - protein, 37 aa, Artificial Sequence
  Description of Artificial Sequence: Synthetic Peptide
EVVPPQVLSEPNEEAGAALSPLPEVPPWTGEVSPAQR

SEQ ID NO: 126 - protein, 28 aa, Artificial Sequence
  Description of Artificial Sequence: Synthetic Peptide
SLRRSSCFGGRMDRIGAQSGLGCNSFRY

SEQ ID NO: 127 - protein, 8 aa, Artificial Sequence
  Description of Artificial Sequence: Synthetic Peptide
FGLKLDRI

SEQ ID NO: 128 - protein, 8 aa, Artificial Sequence
  Description of Artificial Sequence: Synthetic Peptide
FKNLLDHL

SEQ ID NO: 129 - protein, 8 aa, Artificial Sequence
  Description of Artificial Sequence: Synthetic Peptide
LKSKLRAL

SEQ ID NO: 130 - protein, 8 aa, Artificial Sequence
  Description of Artificial Sequence: Synthetic Peptide
FGKRMDRI

SEQ ID NO: 131 - protein, 8 aa, Artificial Sequence
  Description of Artificial Sequence: Synthetic Peptide
  SITE (1)..(1): Xaa is Phe, Ala or Leu
  SITE (2)..(2): Xaa is Gly or Lys
  SITE (3)..(3): Xaa is Asn, Ser, Gyl, Leu or Ala
  SITE (4)..(4): Xaa is any amino acid
  SITE (5)..(5): Xaa is Leu or Met
  SITE (6)..(6): Xaa is Ser, Asp or Arg
  SITE (7)..(7): Xaa is any amino acid
  SITE (8)..(8): Xaa is Ile or Leu
XXXXXXXX

SEQ ID NO: 132 - protein, 15 aa, Artificial Sequence
  Description of Artificial Sequence: Synthetic Peptide
RSSCAGKALSPLGAC

SEQ ID NO: 133 - protein, 8 aa, Artificial Sequence
  Description of Artificial Sequence: Synthetic Peptide
  SITE (7)..(7): Xaa is C, N, P, Q, or R
AGADIDXI

SEQ ID NO: 134 - protein, 8 aa, Artificial Sequence
  Description of Artificial Sequence: Synthetic Peptide
  SITE (7)..(7): Xaa is C, F, G, or H
AGADIDXL

SEQ ID NO: 135 - protein, 8 aa, Artificial Sequence
  Description of Artificial Sequence: Synthetic Peptide
  SITE (7)..(7): Xaa is C, I, K, Q, or W
AGADIRXI

SEQ ID NO: 136 - protein, 8 aa, Artificial Sequence
  Description of Artificial Sequence: Synthetic Peptide
  SITE (7)..(7): Xaa is C, M, N, or P
AGADLRXI

SEQ ID NO: 137 - protein, 8 aa, Artificial Sequence
  Description of Artificial Sequence: Synthetic Peptide
  SITE (7)..(7): Xaa is H, K, or R
AGADIRXL

SEQ ID NO: 138 - protein, 8 aa, Artificial Sequence
  Description of Artificial Sequence: Synthetic Peptide
AGADLRCL

SEQ ID NO: 139 - protein, 8 aa, Artificial Sequence
  Description of Artificial Sequence: Synthetic Peptide
  SITE (7)..(7): Xaa is H, N, or P
AGADISXI

SEQ ID NO: 140 - protein, 8 aa, Artificial Sequence
  Description of Artificial Sequence: Synthetic Peptide
  SITE (7)..(7): Xaa is C, W, or Y
AGADLSXI

SEQ ID NO: 141 - protein, 8 aa, Artificial Sequence
  Description of Artificial Sequence: Synthetic Peptide
  SITE (7)..(7): Xaa is N or W
AGADISXL

SEQ ID NO: 142 - protein, 8 aa, Artificial Sequence
  Description of Artificial Sequence: Synthetic Peptide
  SITE (7)..(7): Xaa is C, H, or K
AGAEIDXI

SEQ ID NO: 143 - protein, 8 aa, Artificial Sequence
  Description of Artificial Sequence: Synthetic Peptide
  SITE (7)..(7): Xaa is M, Q, or Y
AGAELDXI

SEQ ID NO: 144 - protein, 8 aa, Artificial Sequence
  Description of Artificial Sequence: Synthetic Peptide
  SITE (7)..(7): Xaa is H, T, or W
AGAEIDXL

SEQ ID NO: 145 - protein, 8 aa, Artificial Sequence
  Description of Artificial Sequence: Synthetic Peptide
AGAELDML

SEQ ID NO: 146 - protein, 8 aa, Artificial Sequence
  Description of Artificial Sequence: Synthetic Peptide
  SITE (7)..(7): Xaa is A, C, H, M, N, Q, R, or W
AGAEIRXI

SEQ ID NO: 147 - protein, 8 aa, Artificial Sequence
  Description of Artificial Sequence: Synthetic Peptide
  SITE (7)..(7): Xaa is H, M, or Y
AGAELRXI

SEQ ID NO: 148 - protein, 8 aa, Artificial Sequence
  Description of Artificial Sequence: Synthetic Peptide
  SITE (7)..(7): Xaa is C, H, M, N, or Q
AGAEIRXL

SEQ ID NO: 149 - protein, 8 aa, Artificial Sequence
  Description of Artificial Sequence: Synthetic Peptide
AGAELRCL

SEQ ID NO: 150 - protein, 8 aa, Artificial Sequence
  Description of Artificial Sequence: Synthetic Peptide
  SITE (7)..(7): Xaa is C, H, N, P, or Q
AGAEISXI

SEQ ID NO: 151 - protein, 8 aa, Artificial Sequence
  Description of Artificial Sequence: Synthetic Peptide
  SITE (7)..(7): Xaa is H or T
AGAELSXI

SEQ ID NO: 152 - protein, 8 aa, Artificial Sequence
  Description of Artificial Sequence: Synthetic Peptide
  SITE (7)..(7): Xaa is F, K, P, Q, or V
AGAEISXL

SEQ ID NO: 153 - protein, 8 aa, Artificial Sequence
  Description of Artificial Sequence: Synthetic Peptide
  SITE (7)..(7): Xaa is H, M, or W
AGAELSXL

SEQ ID NO: 154 - protein, 8 aa, Artificial Sequence
  Description of Artificial Sequence: Synthetic Peptide
  SITE (7)..(7): Xaa is C, F, G, H, P, Q, V, or Y
AGANIDXI

SEQ ID NO: 155 - protein, 8 aa, Artificial Sequence
  Description of Artificial Sequence: Synthetic Peptide
  SITE (7)..(7): Xaa is H, I, P, or Y
AGANLDXI

SEQ ID NO: 156 - protein, 8 aa, Artificial Sequence
  Description of Artificial Sequence: Synthetic Peptide
  SITE (7)..(7): Xaa is C, H, P, W, or Y
AGANIDXL

SEQ ID NO: 157 - protein, 8 aa, Artificial Sequence
  Description of Artificial Sequence: Synthetic Peptide
  SITE (7)..(7): Xaa is H, T, or Y
AGANLDXL

SEQ ID NO: 158 - protein, 8 aa, Artificial Sequence
  Description of Artificial Sequence: Synthetic Peptide
  SITE (7)..(7): Xaa is A, C, F, K, M, N, P, Q, T, V, or W
AGANIRXI

SEQ ID NO: 159 - protein, 8 aa, Artificial Sequence
  Description of Artificial Sequence: Synthetic Peptide
  SITE (7)..(7): Xaa is C, F, H, I, K, M, P, R, or Y
AGANLRXI

SEQ ID NO: 160 - protein, 8 aa, Artificial Sequence
  Description of Artificial Sequence: Synthetic Peptide
  SITE (7)..(7): Xaa is A, C, D, F, G, H, K, N, P, Q, W, or Y
AGANIRXL

SEQ ID NO: 161 - protein, 8 aa, Artificial Sequence
  Description of Artificial Sequence: Synthetic Peptide
  SITE (7)..(7): Xaa is C, F, I, K, M, N, W, or Y
AGANLRXL

SEQ ID NO: 162 - protein, 8 aa, Artificial Sequence
  Description of Artificial Sequence: Synthetic Peptide
  SITE (7)..(7): Xaa is C, F, H, K, L, M, or W
AGANISXI

SEQ ID NO: 163 - protein, 8 aa, Artificial Sequence
  Description of Artificial Sequence: Synthetic Peptide
  SITE (7)..(7): Xaa is F, H, K, M, Q, W, or Y
AGANLSXI

SEQ ID NO: 164 - protein, 8 aa, Artificial Sequence
  Description of Artificial Sequence: Synthetic Peptide
  SITE (7)..(7): Xaa is I, K, M, N, P, or Q
AGANISXL

SEQ ID NO: 165 - protein, 8 aa, Artificial Sequence
  Description of Artificial Sequence: Synthetic Peptide
  SITE (7)..(7): Xaa is C, H, or Y
AGANLSXL

SEQ ID NO: 166 - protein, 8 aa, Artificial Sequence
  Description of Artificial Sequence: Synthetic Peptide
  SITE (7)..(7): Xaa is C, F, H, L, M, N, P, Q, S, W, or Y
AGAQIDXI

SEQ ID NO: 167 - protein, 8 aa, Artificial Sequence
  Description of Artificial Sequence: Synthetic Peptide
  SITE (7)..(7): Xaa is F, H, M, N, Q, S, V, or Y
AGAQLDXI

SEQ ID NO: 168 - protein, 8 aa, Artificial Sequence
  Description of Artificial Sequence: Synthetic Peptide
  SITE (7)..(7): Xaa is C, D, E, L, P, R, or W
AGAQIDXL

SEQ ID NO: 169 - protein, 8 aa, Artificial Sequence
  Description of Artificial Sequence: Synthetic Peptide
  SITE (7)..(7): Xaa is C, F, M, or W
AGAQLDXL

SEQ ID NO: 170 - protein, 8 aa, Artificial Sequence
  Description of Artificial Sequence: Synthetic Peptide
  SITE (7)..(7): Xaa is C, D, E, F, G, H, I, K ,L, M, N, P, Q, R, or W
AGAQIRXI

SEQ ID NO: 171 - protein, 8 aa, Artificial Sequence
  Description of Artificial Sequence: Synthetic Peptide
  SITE (7)..(7): Xaa is C, D, E, F, G, K, M, W, or Y
AGAQLRXI

SEQ ID NO: 172 - protein, 8 aa, Artificial Sequence
  Description of Artificial Sequence: Synthetic Peptide
  SITE (7)..(7): Xaa is C, K, Q, or W
AGAQIRXL

SEQ ID NO: 173 - protein, 8 aa, Artificial Sequence
  Description of Artificial Sequence: Synthetic Peptide
  SITE (7)..(7): Xaa is C, G, M, or W
AGAQLRXL

SEQ ID NO: 174 - protein, 8 aa, Artificial Sequence
  Description of Artificial Sequence: Synthetic Peptide
  SITE (7)..(7): Xaa is C, E, F, H, M, N, P, R, V ,W, or Y
AGAQISXI

SEQ ID NO: 175 - protein, 8 aa, Artificial Sequence
  Description of Artificial Sequence: Synthetic Peptide
  SITE (7)..(7): Xaa is C, F, I, P, W, or Y
AGAQLSXI

SEQ ID NO: 176 - protein, 8 aa, Artificial Sequence
  Description of Artificial Sequence: Synthetic Peptide
  SITE (7)..(7): Xaa is F, G, K, P, T, or W
AGAQISXL

SEQ ID NO: 177 - protein, 8 aa, Artificial Sequence
  Description of Artificial Sequence: Synthetic Peptide
AGAQLSML

SEQ ID NO: 178 - protein, 8 aa, Artificial Sequence
  Description of Artificial Sequence: Synthetic Peptide
  SITE (7)..(7): Xaa is C, M, P, Q, or T
AGASIDXI

SEQ ID NO: 179 - protein, 8 aa, Artificial Sequence
  Description of Artificial Sequence: Synthetic Peptide
  SITE (7)..(7): Xaa is C, N, Q, or W
AGASIDXL

SEQ ID NO: 180 - protein, 8 aa, Artificial Sequence
  Description of Artificial Sequence: Synthetic Peptide
  SITE (7)..(7): Xaa is C
AGASLDXL

SEQ ID NO: 181 - protein, 8 aa, Artificial Sequence
  Description of Artificial Sequence: Synthetic Peptide
AGASIRCI

SEQ ID NO: 182 - protein, 8 aa, Artificial Sequence
  Description of Artificial Sequence: Synthetic Peptide
  SITE (7)..(7): Xaa is C, H, I, N, Q, or Y
AGASLRXI

SEQ ID NO: 183 - protein, 8 aa, Artificial Sequence
  Description of Artificial Sequence: Synthetic Peptide
  SITE (7)..(7): Xaa is C, V, W, or Y
AGASIRXL

SEQ ID NO: 184 - protein, 8 aa, Artificial Sequence
  Description of Artificial Sequence: Synthetic Peptide
  SITE (7)..(7): Xaa is K
AGASISXI

SEQ ID NO: 185 - protein, 8 aa, Artificial Sequence
  Description of Artificial Sequence: Synthetic Peptide
AGASLSKI

SEQ ID NO: 186 - protein, 8 aa, Artificial Sequence
  Description of Artificial Sequence: Synthetic Peptide
  SITE (7)..(7): Xaa is C, H, K, or Y
AGASISXL

SEQ ID NO: 187 - protein, 8 aa, Artificial Sequence
  Description of Artificial Sequence: Synthetic Peptide
  SITE (7)..(7): Xaa is C, F, G, H, K, M, P, Q, S, or W
AGGDIDXI

SEQ ID NO: 188 - protein, 8 aa, Artificial Sequence
  Description of Artificial Sequence: Synthetic Peptide
  SITE (7)..(7): Xaa is C, D, M, or S
AGGDLDXI

SEQ ID NO: 189 - protein, 8 aa, Artificial Sequence
  Description of Artificial Sequence: Synthetic Peptide
  SITE (7)..(7): Xaa is D, H, S, or W
AGGDIDXL

SEQ ID NO: 190 - protein, 8 aa, Artificial Sequence
  Description of Artificial Sequence: Synthetic Peptide
  SITE (7)..(7): Xaa is C, or W
AGGDLDXL

SEQ ID NO: 191 - protein, 8 aa, Artificial Sequence
  Description of Artificial Sequence: Synthetic Peptide
  SITE (7)..(7): Xaa is C, D, P, or W
AGGDIRXI

SEQ ID NO: 192 - protein, 8 aa, Artificial Sequence
  Description of Artificial Sequence: Synthetic Peptide
AGGDLRPI

SEQ ID NO: 193 - protein, 8 aa, Artificial Sequence
  Description of Artificial Sequence: Synthetic Peptide
  SITE (7)..(7): Xaa is C or F
AGGDLRXL

SEQ ID NO: 194 - protein, 7 aa, Artificial Sequence
  Description of Artificial Sequence: Synthetic Peptide
  SITE (7)..(7): Xaa is I, P, or Y
AGGDISI

SEQ ID NO: 195 - protein, 8 aa, Artificial Sequence
  Description of Artificial Sequence: Synthetic Peptide
  SITE (7)..(7): Xaa is C, F, K, P, or W
AGGDLSXI

SEQ ID NO: 196 - protein, 8 aa, Artificial Sequence
  Description of Artificial Sequence: Synthetic Peptide
  SITE (7)..(7): Xaa is H, S, W, or Y
AGGDISXL

SEQ ID NO: 197 - protein, 8 aa, Artificial Sequence
  Description of Artificial Sequence: Synthetic Peptide
  SITE (7)..(7): Xaa is C, F, or H
AGGDLSXL

SEQ ID NO: 198 - protein, 8 aa, Artificial Sequence
  Description of Artificial Sequence: Synthetic Peptide
  SITE (7)..(7): Xaa is C, E, F, M, N, P, Q, R, S, or Y
AGGEIDXI

SEQ ID NO: 199 - protein, 7 aa, Artificial Sequence
  Description of Artificial Sequence: Synthetic Peptide
  SITE (7)..(7): Xaa is C, D, G, I, M, N, P, Q, S, V, or W
AGGELDI

SEQ ID NO: 200 - protein, 7 aa, Artificial Sequence
  Description of Artificial Sequence: Synthetic Peptide
  SITE (7)..(7): Xaa is C, H, M, N, P, S, W, or Y
AGGEIDL

SEQ ID NO: 201 - protein, 8 aa, Artificial Sequence
  Description of Artificial Sequence: Synthetic Peptide
AGGELDCL

SEQ ID NO: 202 - protein, 8 aa, Artificial Sequence
  Description of Artificial Sequence: Synthetic Peptide
  SITE (7)..(7): Xaa is A, F, G, H, I, K, M, N, R, or W
AGGEIRXI

SEQ ID NO: 203 - protein, 8 aa, Artificial Sequence
  Description of Artificial Sequence: Synthetic Peptide
  SITE (7)..(7): Xaa is C, E, G, K, M, P, Q, or T
AGGELRXI

SEQ ID NO: 204 - protein, 8 aa, Artificial Sequence
  Description of Artificial Sequence: Synthetic Peptide
AGGEIRML

SEQ ID NO: 205 - protein, 8 aa, Artificial Sequence
  Description of Artificial Sequence: Synthetic Peptide
  SITE (7)..(7): Xaa is I, M, N, or Y
AGGELRXL

SEQ ID NO: 206 - protein, 8 aa, Artificial Sequence
  Description of Artificial Sequence: Synthetic Peptide
  SITE (7)..(7): Xaa is A, E, F, H, I, M, N, R, S, W, and Y
AGGEISXI

SEQ ID NO: 207 - protein, 8 aa, Artificial Sequence
  Description of Artificial Sequence: Synthetic Peptide
  SITE (7)..(7): Xaa is C, F, H, K, M, N, P, Q, S, and W
AGGELSXI

SEQ ID NO: 208 - protein, 8 aa, Artificial Sequence
  Description of Artificial Sequence: Synthetic Peptide
  SITE (7)..(7): Xaa is C, H, M, or  W
AGGEISXL

SEQ ID NO: 209 - protein, 8 aa, Artificial Sequence
  Description of Artificial Sequence: Synthetic Peptide
  SITE (7)..(7): Xaa is M, P, or Y
AGGELSXL

SEQ ID NO: 210 - protein, 8 aa, Artificial Sequence
  Description of Artificial Sequence: Synthetic Peptide
  SITE (7)..(7): Xaa is C, D, F, G, H, L, M, P, S, T, W, or Y
AGGNIDXI

SEQ ID NO: 211 - protein, 8 aa, Artificial Sequence
  Description of Artificial Sequence: Synthetic Peptide
  SITE (7)..(7): Xaa is C, D, F, G, N, S, W, or Y
AGGNLDXI

SEQ ID NO: 212 - protein, 8 aa, Artificial Sequence
  Description of Artificial Sequence: Synthetic Peptide
  SITE (7)..(7): Xaa is C, F, G, K, M, P, R, or W
AGGNIDXL

SEQ ID NO: 213 - protein, 8 aa, Artificial Sequence
  Description of Artificial Sequence: Synthetic Peptide
  SITE (7)..(7): Xaa is C, G, H, I, K, M, or Q
AGGNLDXL

SEQ ID NO: 214 - protein, 8 aa, Artificial Sequence
  Description of Artificial Sequence: Synthetic Peptide
  SITE (7)..(7): Xaa is C, F, H, I, L, M, P, R, V, W, or Y
AGGNIRXI

SEQ ID NO: 215 - protein, 8 aa, Artificial Sequence
  Description of Artificial Sequence: Synthetic Peptide
  SITE (7)..(7): Xaa is C, D, H, I, K, L, N, P, R, V, W, or Y
AGGNLRXI

SEQ ID NO: 216 - protein, 8 aa, Artificial Sequence
  Description of Artificial Sequence: Synthetic Peptide
  SITE (7)..(7): Xaa is F, G, I, M, P, Q, W, or Y
AGGNIRXL

SEQ ID NO: 217 - protein, 8 aa, Artificial Sequence
  Description of Artificial Sequence: Synthetic Peptide
  SITE (7)..(7): Xaa is C, D, E, G, M, P, Q, or W
AGGNISXI

SEQ ID NO: 218 - protein, 8 aa, Artificial Sequence
  Description of Artificial Sequence: Synthetic Peptide
  SITE (7)..(7): Xaa is D, F, M, W, or Y
AGGNLSXI

SEQ ID NO: 219 - protein, 8 aa, Artificial Sequence
  Description of Artificial Sequence: Synthetic Peptide
  SITE (7)..(7): Xaa is C, P, or W
AGGNISXL

SEQ ID NO: 220 - protein, 8 aa, Artificial Sequence
  Description of Artificial Sequence: Synthetic Peptide
  SITE (7)..(7): Xaa is C, F, K, or Q
AGGNLSXL

SEQ ID NO: 221 - protein, 8 aa, Artificial Sequence
  Description of Artificial Sequence: Synthetic Peptide
  SITE (7)..(7): Xaa is C, E, F, K, M, N, P, Q, T, V, W, or Y
AGGQIDXI

SEQ ID NO: 222 - protein, 8 aa, Artificial Sequence
  Description of Artificial Sequence: Synthetic Peptide
  SITE (7)..(7): Xaa is C, E, H, I, K, N, P, R, V, or Y
AGGQLDXI

SEQ ID NO: 223 - protein, 8 aa, Artificial Sequence
  Description of Artificial Sequence: Synthetic Peptide
  SITE (7)..(7): Xaa is C, D, F, H, L, M, N, W, or Y
AGGQIDXL

SEQ ID NO: 224 - protein, 8 aa, Artificial Sequence
  Description of Artificial Sequence: Synthetic Peptide
  SITE (7)..(7): Xaa is C, D, F, G, H, M, N, or Q
AGGQLDXL

SEQ ID NO: 225 - protein, 8 aa, Artificial Sequence
  Description of Artificial Sequence: Synthetic Peptide
  SITE (7)..(7): Xaa is C, E, G, H, L, N, P, R, S, T, V, W, or Y
AGGQIRXI

SEQ ID NO: 226 - protein, 8 aa, Artificial Sequence
  Description of Artificial Sequence: Synthetic Peptide
  SITE (7)..(7): Xaa is C, F, H, L, M, N, P, S, or W
AGGQLRXI

SEQ ID NO: 227 - protein, 8 aa, Artificial Sequence
  Description of Artificial Sequence: Synthetic Peptide
  SITE (7)..(7): Xaa is C, E, F, G, H, I, K, M, Q, or S
AGGQIRXL

SEQ ID NO: 228 - protein, 8 aa, Artificial Sequence
  Description of Artificial Sequence: Synthetic Peptide
  SITE (7)..(7): Xaa is C, F, H, N, T, or Y
AGGQLRXL

SEQ ID NO: 229 - protein, 8 aa, Artificial Sequence
  Description of Artificial Sequence: Synthetic Peptide
  SITE (7)..(7): Xaa is A, C, D, E, I, K, L, N, P, Q, R, T, W, or Y
AGGQISXI

SEQ ID NO: 230 - protein, 8 aa, Artificial Sequence
  Description of Artificial Sequence: Synthetic Peptide
  SITE (7)..(7): Xaa is A, C, D, E, H, I, K, M, N, R, T, W, or Y
AGGQLSXI

SEQ ID NO: 231 - protein, 8 aa, Artificial Sequence
  Description of Artificial Sequence: Synthetic Peptide
  SITE (7)..(7): Xaa is H, I, M, N, Q, T, or Y
AGGQISXL

SEQ ID NO: 232 - protein, 8 aa, Artificial Sequence
  Description of Artificial Sequence: Synthetic Peptide
  SITE (7)..(7): Xaa is I, M, P, W, or Y
AGGQLSXL

SEQ ID NO: 233 - protein, 8 aa, Artificial Sequence
  Description of Artificial Sequence: Synthetic Peptide
  SITE (7)..(7): Xaa is C, F, H, I, K, M, P, V, W, or Y
AGGSIDXI

SEQ ID NO: 234 - protein, 8 aa, Artificial Sequence
  Description of Artificial Sequence: Synthetic Peptide
  SITE (7)..(7): Xaa is C, F, or I
AGGSLDXI

SEQ ID NO: 235 - protein, 8 aa, Artificial Sequence
  Description of Artificial Sequence: Synthetic Peptide
  SITE (7)..(7): Xaa is C, M, W, or Y
AGGSIDXL

SEQ ID NO: 236 - protein, 8 aa, Artificial Sequence
  Description of Artificial Sequence: Synthetic Peptide
  SITE (7)..(7): Xaa is H, M, P, R, or W
AGGSIRXI

SEQ ID NO: 237 - protein, 8 aa, Artificial Sequence
  Description of Artificial Sequence: Synthetic Peptide
  SITE (7)..(7): Xaa is E, F, M, or W
AGGSLRXI

SEQ ID NO: 238 - protein, 8 aa, Artificial Sequence
  Description of Artificial Sequence: Synthetic Peptide
  SITE (7)..(7): Xaa is C, E, M, R, W, or Y
AGGSIRXL

SEQ ID NO: 239 - protein, 8 aa, Artificial Sequence
  Description of Artificial Sequence: Synthetic Peptide
AGGSLRYL

SEQ ID NO: 240 - protein, 8 aa, Artificial Sequence
  Description of Artificial Sequence: Synthetic Peptide
  SITE (7)..(7): Xaa is C, F, H, I, K, M, P, V, W, or Y
AGGSISXI

SEQ ID NO: 241 - protein, 8 aa, Artificial Sequence
  Description of Artificial Sequence: Synthetic Peptide
  SITE (7)..(7): Xaa is C, R, V, or W
AGGSLSXI

SEQ ID NO: 242 - protein, 8 aa, Artificial Sequence
  Description of Artificial Sequence: Synthetic Peptide
  SITE (7)..(7): Xaa is C, E, M, R, W, or Y
AGGSISXL

SEQ ID NO: 243 - protein, 8 aa, Artificial Sequence
  Description of Artificial Sequence: Synthetic Peptide
  SITE (7)..(7): Xaa is C, or Y
AGGSLSXL

SEQ ID NO: 244 - protein, 8 aa, Artificial Sequence
  Description of Artificial Sequence: Synthetic Peptide
  SITE (7)..(7): Xaa is C, E, L, N, P, W, or Y
AGLDIDXI

SEQ ID NO: 245 - protein, 8 aa, Artificial Sequence
  Description of Artificial Sequence: Synthetic Peptide
  SITE (7)..(7): Xaa is F, M, W, or Y
AGLDLDXI

SEQ ID NO: 246 - protein, 8 aa, Artificial Sequence
  Description of Artificial Sequence: Synthetic Peptide
  SITE (7)..(7): Xaa is C, F, H, or P
AGLDIDXL

SEQ ID NO: 247 - protein, 8 aa, Artificial Sequence
  Description of Artificial Sequence: Synthetic Peptide
AGLDLDCL

SEQ ID NO: 248 - protein, 8 aa, Artificial Sequence
  Description of Artificial Sequence: Synthetic Peptide
  SITE (7)..(7): Xaa is C, F, K, L, W, or Y
AGLDIRXI

SEQ ID NO: 249 - protein, 8 aa, Artificial Sequence
  Description of Artificial Sequence: Synthetic Peptide
  SITE (7)..(7): Xaa is C, H, M, or W
AGLDLRXI

SEQ ID NO: 250 - protein, 8 aa, Artificial Sequence
  Description of Artificial Sequence: Synthetic Peptide
  SITE (7)..(7): Xaa is H, K, or W
AGLDIRXL

SEQ ID NO: 251 - protein, 8 aa, Artificial Sequence
  Description of Artificial Sequence: Synthetic Peptide
  SITE (7)..(7): Xaa is C, F, H, R or W
AGLDISXI

SEQ ID NO: 252 - protein, 8 aa, Artificial Sequence
  Description of Artificial Sequence: Synthetic Peptide
  SITE (7)..(7): Xaa is C, F, W, or Y
AGLDLSXI

SEQ ID NO: 253 - protein, 8 aa, Artificial Sequence
  Description of Artificial Sequence: Synthetic Peptide
  SITE (7)..(7): Xaa is C, M, or W
AGLDISXL

SEQ ID NO: 254 - protein, 8 aa, Artificial Sequence
  Description of Artificial Sequence: Synthetic Peptide
AGLDLSWL

SEQ ID NO: 255 - protein, 8 aa, Artificial Sequence
  Description of Artificial Sequence: Synthetic Peptide
  SITE (7)..(7): Xaa is C, H, K, Q, or W
AGLEIDXI

SEQ ID NO: 256 - protein, 8 aa, Artificial Sequence
  Description of Artificial Sequence: Synthetic Peptide
  SITE (7)..(7): Xaa is C, F, or H
AGLELDXI

SEQ ID NO: 257 - protein, 8 aa, Artificial Sequence
  Description of Artificial Sequence: Synthetic Peptide
  SITE (7)..(7): Xaa is C, D, M, P, Q, or T
AGLEIDXL

SEQ ID NO: 258 - protein, 8 aa, Artificial Sequence
  Description of Artificial Sequence: Synthetic Peptide
  SITE (7)..(7): Xaa is C, I, M, P, W, or Y
AGLELDXL

SEQ ID NO: 259 - protein, 8 aa, Artificial Sequence
  Description of Artificial Sequence: Synthetic Peptide
  SITE (7)..(7): Xaa is C, H, I, M, P, Q, R, W, or Y
AGLEIRXI

SEQ ID NO: 260 - protein, 8 aa, Artificial Sequence
  Description of Artificial Sequence: Synthetic Peptide
  SITE (7)..(7): Xaa is C, F, H, I, or Y
AGLELRXI

SEQ ID NO: 261 - protein, 8 aa, Artificial Sequence
  Description of Artificial Sequence: Synthetic Peptide
  SITE (7)..(7): Xaa is C, H, or W
AGLEIRXL

SEQ ID NO: 262 - protein, 8 aa, Artificial Sequence
  Description of Artificial Sequence: Synthetic Peptide
  SITE (7)..(7): Xaa is C, W, or Y
AGLELRXL

SEQ ID NO: 263 - protein, 8 aa, Artificial Sequence
  Description of Artificial Sequence: Synthetic Peptide
  SITE (7)..(7): Xaa is C, K, T, or W
AGLEISXI

SEQ ID NO: 264 - protein, 8 aa, Artificial Sequence
  Description of Artificial Sequence: Synthetic Peptide
  SITE (7)..(7): Xaa is M or Y
AGLELSXI

SEQ ID NO: 265 - protein, 8 aa, Artificial Sequence
  Description of Artificial Sequence: Synthetic Peptide
  SITE (7)..(7): Xaa is C, H, M, V, or W
AGLEISXL

SEQ ID NO: 266 - protein, 8 aa, Artificial Sequence
  Description of Artificial Sequence: Synthetic Peptide
  SITE (7)..(7): Xaa is C, F, H, N, R, V, W, or Y
AGLNIDXI

SEQ ID NO: 267 - protein, 8 aa, Artificial Sequence
  Description of Artificial Sequence: Synthetic Peptide
  SITE (7)..(7): Xaa is C, F, G, H, Q, S, V, W, or Y
AGLNLDXI

SEQ ID NO: 268 - protein, 8 aa, Artificial Sequence
  Description of Artificial Sequence: Synthetic Peptide
  SITE (7)..(7): Xaa is A, C, H, P, or W
AGLNIDXL

SEQ ID NO: 269 - protein, 8 aa, Artificial Sequence
  Description of Artificial Sequence: Synthetic Peptide
  SITE (7)..(7): Xaa is C or M
AGLNLDXL

SEQ ID NO: 270 - protein, 8 aa, Artificial Sequence
  Description of Artificial Sequence: Synthetic Peptide
  SITE (7)..(7): Xaa is C, F, G, H, K, L, M, N, P, Q, R, S, T, V, W, or Y
AGLNIRXI

SEQ ID NO: 271 - protein, 8 aa, Artificial Sequence
  Description of Artificial Sequence: Synthetic Peptide
  SITE (7)..(7): Xaa is C, G, H, I, M, N, Q, W, or Y
AGLNLRXI

SEQ ID NO: 272 - protein, 8 aa, Artificial Sequence
  Description of Artificial Sequence: Synthetic Peptide
  SITE (7)..(7): Xaa is C, F, Q, S, W, or Y
AGLNIRXL

SEQ ID NO: 273 - protein, 8 aa, Artificial Sequence
  Description of Artificial Sequence: Synthetic Peptide
  SITE (7)..(7): Xaa is C, F, M, N, or W
AGLNLRXL

SEQ ID NO: 274 - protein, 8 aa, Artificial Sequence
  Description of Artificial Sequence: Synthetic Peptide
  SITE (7)..(7): Xaa is C, I, M, P, W, or Y
AGLNISXI

SEQ ID NO: 275 - protein, 8 aa, Artificial Sequence
  Description of Artificial Sequence: Synthetic Peptide
  SITE (7)..(7): Xaa is C, H, V, or Y
AGLNLSXI

SEQ ID NO: 276 - protein, 8 aa, Artificial Sequence
  Description of Artificial Sequence: Synthetic Peptide
  SITE (7)..(7): Xaa is C, G, H, L, M, or P
AGLNISXL

SEQ ID NO: 277 - protein, 8 aa, Artificial Sequence
  Description of Artificial Sequence: Synthetic Peptide
  SITE (7)..(7): Xaa is C, Q, or W
AGLNLSXL

SEQ ID NO: 278 - protein, 8 aa, Artificial Sequence
  Description of Artificial Sequence: Synthetic Peptide
  SITE (7)..(7): Xaa is C, F, G, H, I, L, N, P, Q, S, T, V, or W
AGLQIDXI

SEQ ID NO: 279 - protein, 8 aa, Artificial Sequence
  Description of Artificial Sequence: Synthetic Peptide
  SITE (7)..(7): Xaa is A, C, E, F, H, K, P, S, T, V, or W
AGLQLDXI

SEQ ID NO: 280 - protein, 8 aa, Artificial Sequence
  Description of Artificial Sequence: Synthetic Peptide
  SITE (7)..(7): Xaa is A, C, E, F, G, I, S, or W
AGLQIDXL

SEQ ID NO: 281 - protein, 8 aa, Artificial Sequence
  Description of Artificial Sequence: Synthetic Peptide
  SITE (7)..(7): Xaa is C, F, H, M, or W
AGLQLDXL

SEQ ID NO: 282 - protein, 8 aa, Artificial Sequence
  Description of Artificial Sequence: Synthetic Peptide
  SITE (7)..(7): Xaa is A, C, F, H, I, K, M, N, P, Q, V, W, or Y
AGLQIRXI

SEQ ID NO: 283 - protein, 7 aa, Artificial Sequence
  Description of Artificial Sequence: Synthetic Peptide
  SITE (7)..(7): Xaa is C, D, G, I, K, L, M, P, Q, R, T, V, W, or Y
AGLQLRI

SEQ ID NO: 284 - protein, 8 aa, Artificial Sequence
  Description of Artificial Sequence: Synthetic Peptide
  SITE (7)..(7): Xaa is C, E, F, H, I, T, W, or Y
AGLQIRXL

SEQ ID NO: 285 - protein, 8 aa, Artificial Sequence
  Description of Artificial Sequence: Synthetic Peptide
  SITE (7)..(7): Xaa is I, K, L, or W
AGLQLRXL

SEQ ID NO: 286 - protein, 8 aa, Artificial Sequence
  Description of Artificial Sequence: Synthetic Peptide
  SITE (7)..(7): Xaa is C, F, G, I, M, S, V, W, or Y
AGLQISXI

SEQ ID NO: 287 - protein, 8 aa, Artificial Sequence
  Description of Artificial Sequence: Synthetic Peptide
  SITE (7)..(7): Xaa is C, H, I, K, P, W, or Y
AGLQLSXI

SEQ ID NO: 288 - protein, 8 aa, Artificial Sequence
  Description of Artificial Sequence: Synthetic Peptide
  SITE (7)..(7): Xaa is C, I, M, Q, or W
AGLQISXL

SEQ ID NO: 289 - protein, 8 aa, Artificial Sequence
  Description of Artificial Sequence: Synthetic Peptide
  SITE (7)..(7): Xaa is C, M, or W
AGLQLSXL

SEQ ID NO: 290 - protein, 8 aa, Artificial Sequence
  Description of Artificial Sequence: Synthetic Peptide
  SITE (7)..(7): Xaa is C, I, L, M, or S
AGLSIDXI

SEQ ID NO: 291 - protein, 8 aa, Artificial Sequence
  Description of Artificial Sequence: Synthetic Peptide
AGLSLDCI

SEQ ID NO: 292 - protein, 8 aa, Artificial Sequence
  Description of Artificial Sequence: Synthetic Peptide
  SITE (7)..(7): Xaa is C, M, or W
AGLSIDXL

SEQ ID NO: 293 - protein, 8 aa, Artificial Sequence
  Description of Artificial Sequence: Synthetic Peptide
  SITE (7)..(7): Xaa is C or F
AGLSLDXL

SEQ ID NO: 294 - protein, 8 aa, Artificial Sequence
  Description of Artificial Sequence: Synthetic Peptide
  SITE (7)..(7): Xaa is I, M, N, or W
AGLSIRXI

SEQ ID NO: 295 - protein, 8 aa, Artificial Sequence
  Description of Artificial Sequence: Synthetic Peptide
  SITE (7)..(7): Xaa is C, F, or H
AGLSLRXI

SEQ ID NO: 296 - protein, 8 aa, Artificial Sequence
  Description of Artificial Sequence: Synthetic Peptide
  SITE (7)..(7): Xaa is I, K, or M
AGLSIRXL

SEQ ID NO: 297 - protein, 8 aa, Artificial Sequence
  Description of Artificial Sequence: Synthetic Peptide
  SITE (7)..(7): Xaa is H or M
AGLSLSXI

SEQ ID NO: 298 - protein, 8 aa, Artificial Sequence
  Description of Artificial Sequence: Synthetic Peptide
  SITE (7)..(7): Xaa is C or H
AGLSISXL

SEQ ID NO: 299 - protein, 8 aa, Artificial Sequence
  Description of Artificial Sequence: Synthetic Peptide
  SITE (7)..(7): Xaa is C, D, F, G, L, M, N, P, Q, R, S, T, V, or W
AGNDIDXI

SEQ ID NO: 300 - protein, 8 aa, Artificial Sequence
  Description of Artificial Sequence: Synthetic Peptide
  SITE (7)..(7): Xaa is A, D, F, G, H, K, L, S, T, or Y
AGNDLDXI

SEQ ID NO: 301 - protein, 8 aa, Artificial Sequence
  Description of Artificial Sequence: Synthetic Peptide
  SITE (7)..(7): Xaa is C, E, H, I, K, M, Q, R, W, or Y
AGNDIDXL

SEQ ID NO: 302 - protein, 8 aa, Artificial Sequence
  Description of Artificial Sequence: Synthetic Peptide
  SITE (7)..(7): Xaa is H, K, or W
AGNDLDXL

SEQ ID NO: 303 - protein, 7 aa, Artificial Sequence
  Description of Artificial Sequence: Synthetic Peptide
  SITE (7)..(7): Xaa is C, I, K, M, N, Q, S, T, V, or W
AGNDIRI

SEQ ID NO: 304 - protein, 7 aa, Artificial Sequence
  Description of Artificial Sequence: Synthetic Peptide
  SITE (7)..(7): Xaa is A, C, D, E, F, G, I, M, ,N Q, S, V, W, or Y
AGNDLRI

SEQ ID NO: 305 - protein, 8 aa, Artificial Sequence
  Description of Artificial Sequence: Synthetic Peptide
  SITE (7)..(7): Xaa is F, M, N, Q, R, T, or W
AGNDIRXL

SEQ ID NO: 306 - protein, 8 aa, Artificial Sequence
  Description of Artificial Sequence: Synthetic Peptide
  SITE (7)..(7): Xaa is C, I, M, W, or Y
AGNDLRXL

SEQ ID NO: 307 - protein, 8 aa, Artificial Sequence
  Description of Artificial Sequence: Synthetic Peptide
  SITE (7)..(7): Xaa is D, E, F, H, or Y
AGNDISXI

SEQ ID NO: 308 - protein, 8 aa, Artificial Sequence
  Description of Artificial Sequence: Synthetic Peptide
  SITE (7)..(7): Xaa is C, D, E, G, H, K, N, P, Q, R, T, or W
AGNDLSXI

SEQ ID NO: 309 - protein, 8 aa, Artificial Sequence
  Description of Artificial Sequence: Synthetic Peptide
  SITE (7)..(7): Xaa is C, G, N ,Q, or T
AGNDISXL

SEQ ID NO: 310 - protein, 8 aa, Artificial Sequence
  Description of Artificial Sequence: Synthetic Peptide
  SITE (7)..(7): Xaa is C, E, H, I, W, or Y
AGNDLSXL

SEQ ID NO: 311 - protein, 8 aa, Artificial Sequence
  Description of Artificial Sequence: Synthetic Peptide
  SITE (7)..(7): Xaa is C, D, F, G, H, K, M, N, P, Q, S, V, W, or Y
AGNEIDXI

SEQ ID NO: 312 - protein, 7 aa, Artificial Sequence
  Description of Artificial Sequence: Synthetic Peptide
  SITE (7)..(7): Xaa is A, C ,H, M, O, Q, T, W, or Y
AGNELDI

SEQ ID NO: 313 - protein, 8 aa, Artificial Sequence
  Description of Artificial Sequence: Synthetic Peptide
  SITE (7)..(7): Xaa is C, F, G, K, P, or Q
AGNEIDXL

SEQ ID NO: 314 - protein, 8 aa, Artificial Sequence
  Description of Artificial Sequence: Synthetic Peptide
  SITE (7)..(7): Xaa is C, F, G ,H, I, K, M, N, Q, S, V, or Y
AGNELDXL

SEQ ID NO: 315 - protein, 8 aa, Artificial Sequence
  Description of Artificial Sequence: Synthetic Peptide
  SITE (7)..(7): Xaa is A, C ,H, M, O, Q, T, W, or Y
AGNELDXL

SEQ ID NO: 316 - protein, 8 aa, Artificial Sequence
  Description of Artificial Sequence: Synthetic Peptide
  SITE (7)..(7): Xaa is A, C, E, F, G, H, K, M, N, P, Q, S, W, or Y
AGNELRXI

SEQ ID NO: 317 - protein, 8 aa, Artificial Sequence
  Description of Artificial Sequence: Synthetic Peptide
  SITE (7)..(7): Xaa is C, D, F, G, H, K, M, N, or W
AGNEIRXL

SEQ ID NO: 318 - protein, 8 aa, Artificial Sequence
  Description of Artificial Sequence: Synthetic Peptide
  SITE (7)..(7): Xaa is C, F, G, H, M, P, V, W, or Y
AGNELRXL

SEQ ID NO: 319 - protein, 8 aa, Artificial Sequence
  Description of Artificial Sequence: Synthetic Peptide
  SITE (7)..(7): Xaa is C, D, E, F, G, H, K, L, M, N, Q, R, S, T, W, or Y
AGNEISXI

SEQ ID NO: 320 - protein, 8 aa, Artificial Sequence
  Description of Artificial Sequence: Synthetic Peptide
  SITE (7)..(7): Xaa is D, H, K, L, M, T, V, or W
AGNELSXI

SEQ ID NO: 321 - protein, 8 aa, Artificial Sequence
  Description of Artificial Sequence: Synthetic Peptide
  SITE (7)..(7): Xaa is A, C, D, G, H, K, L, M, Q, or Y
AGNEISXL

SEQ ID NO: 322 - protein, 8 aa, Artificial Sequence
  Description of Artificial Sequence: Synthetic Peptide
  SITE (7)..(7): Xaa is C, D, W, or Y
AGNELSXL

SEQ ID NO: 323 - protein, 8 aa, Artificial Sequence
  Description of Artificial Sequence: Synthetic Peptide
  SITE (7)..(7): Xaa is A, C, E, F, H, K, L, M, N, P, Q, R, V, W, or Y
AGNNIDXI

SEQ ID NO: 324 - protein, 8 aa, Artificial Sequence
  Description of Artificial Sequence: Synthetic Peptide
  SITE (7)..(7): Xaa is C, E, F, H, K, L, M, N, P, Q, R, T, V, or W
AGNNLDXI

SEQ ID NO: 325 - protein, 8 aa, Artificial Sequence
  Description of Artificial Sequence: Synthetic Peptide
  SITE (7)..(7): Xaa is A, C, F, P, R, W, or Y
AGNNIDXL

SEQ ID NO: 326 - protein, 8 aa, Artificial Sequence
  Description of Artificial Sequence: Synthetic Peptide
  SITE (7)..(7): Xaa is A, C, F, M, R, T, V, or W
AGNNLDXL

SEQ ID NO: 327 - protein, 8 aa, Artificial Sequence
  Description of Artificial Sequence: Synthetic Peptide
  SITE (7)..(7): Xaa is C, F, G, H, L, M, P, R, V, or W
AGNNIRXI

SEQ ID NO: 328 - protein, 8 aa, Artificial Sequence
  Description of Artificial Sequence: Synthetic Peptide
  SITE (7)..(7): Xaa is A, C, D, F, G, I, K, L, N, P, R, T, V, W, or Y
AGNNLRXI

SEQ ID NO: 329 - protein, 8 aa, Artificial Sequence
  Description of Artificial Sequence: Synthetic Peptide
  SITE (7)..(7): Xaa is A, C, E, G, H, I, K, M, N, P, Q, T, V, W, or Y
AGNNIRXL

SEQ ID NO: 330 - protein, 8 aa, Artificial Sequence
  Description of Artificial Sequence: Synthetic Peptide
  SITE (7)..(7): A, C, F, H, I, K, L, M, N, P, Q, T, W, or Y
AGNNLRXL

SEQ ID NO: 331 - protein, 8 aa, Artificial Sequence
  Description of Artificial Sequence: Synthetic Peptide
  SITE (7)..(7): Xaa is C, D, F, G, M, P, R, S, W, or Y
AGNNISXI

SEQ ID NO: 332 - protein, 8 aa, Artificial Sequence
  Description of Artificial Sequence: Synthetic Peptide
  SITE (7)..(7): Xaa is A, C, D, F, G, H, K, M, N, R, S, T, W, or Y
AGNNLSXI

SEQ ID NO: 333 - protein, 8 aa, Artificial Sequence
  Description of Artificial Sequence: Synthetic Peptide
  SITE (7)..(7): Xaa is A, C, G, H, M, N, P, R, or T
AGNNISXL

SEQ ID NO: 334 - protein, 8 aa, Artificial Sequence
  Description of Artificial Sequence: Synthetic Peptide
  SITE (7)..(7): Xaa is A, C, G, H, R, or W
AGNNLSXL

SEQ ID NO: 335 - protein, 8 aa, Artificial Sequence
  Description of Artificial Sequence: Synthetic Peptide
  SITE (7)..(7): Xaa is A, C, D, F, G, H, I, K, M, N, P, Q, R, S, T, W, or Y
AGNQIDXI

SEQ ID NO: 336 - protein, 8 aa, Artificial Sequence
  Description of Artificial Sequence: Synthetic Peptide
  SITE (7)..(7): Xaa is C, D, F, G, H, K, L, M, P, R, T, W, or Y
AGNQLDXI

SEQ ID NO: 337 - protein, 8 aa, Artificial Sequence
  Description of Artificial Sequence: Synthetic Peptide
  SITE (7)..(7): Xaa is A, C, D, E, F, G, P, S, W, or Y
AGNQIDXL

SEQ ID NO: 338 - protein, 8 aa, Artificial Sequence
  Description of Artificial Sequence: Synthetic Peptide
  SITE (7)..(7): Xaa is C, D, E, F, H, M, P, Q, or V
AGNQLDXL

SEQ ID NO: 339 - protein, 8 aa, Artificial Sequence
  Description of Artificial Sequence: Synthetic Peptide
  SITE (7)..(7): Xaa is A, C, E, F, G, I, L, N, P, S, V, or W
AGNQIRXI

SEQ ID NO: 340 - protein, 8 aa, Artificial Sequence
  Description of Artificial Sequence: Synthetic Peptide
  SITE (7)..(7): Xaa is A, C, D, E, H, I, K, L, M, P, V, or W
AGNQLRXI

SEQ ID NO: 341 - protein, 8 aa, Artificial Sequence
  Description of Artificial Sequence: Synthetic Peptide
  SITE (7)..(7): Xaa is C, E, F, G, H, I, L, M, Q, S, T, W, or Y
AGNQIRXL

SEQ ID NO: 342 - protein, 8 aa, Artificial Sequence
  Description of Artificial Sequence: Synthetic Peptide
  SITE (7)..(7): Xaa is C, D, G, I, K, M, P, R, W, or Y
AGNQLRXL

SEQ ID NO: 343 - protein, 8 aa, Artificial Sequence
  Description of Artificial Sequence: Synthetic Peptide
  SITE (7)..(7): Xaa is A, D, F, H, I, K, L, M, Q, T, or W
AGNQISXI

SEQ ID NO: 344 - protein, 8 aa, Artificial Sequence
  Description of Artificial Sequence: Synthetic Peptide
  SITE (7)..(7): Xaa is D, F, I, K, L, M, N, Q, R, or W
AGNQLSXI

SEQ ID NO: 345 - protein, 8 aa, Artificial Sequence
  Description of Artificial Sequence: Synthetic Peptide
  SITE (7)..(7): Xaa is C, D, H, P, Q, W, or Y
AGNQISXL

SEQ ID NO: 346 - protein, 8 aa, Artificial Sequence
  Description of Artificial Sequence: Synthetic Peptide
  SITE (7)..(7): Xaa is C, F, I, M, or N
AGNQLSXL

SEQ ID NO: 347 - protein, 8 aa, Artificial Sequence
  Description of Artificial Sequence: Synthetic Peptide
  SITE (7)..(7): Xaa is C, D, F ,H, I, K, M, N, O, Q, V, W, or Y
AGNSIDXI

SEQ ID NO: 348 - protein, 8 aa, Artificial Sequence
  Description of Artificial Sequence: Synthetic Peptide
  SITE (7)..(7): Xaa is F, H, K, R, T, V, W, or Y
AGNSLDXI

SEQ ID NO: 349 - protein, 8 aa, Artificial Sequence
  Description of Artificial Sequence: Synthetic Peptide
  SITE (7)..(7): Xaa is E, G, H, I, K, R, S, or W
AGNSIDXL

SEQ ID NO: 350 - protein, 8 aa, Artificial Sequence
  Description of Artificial Sequence: Synthetic Peptide
  SITE (7)..(7): Xaa is C, H, or N
AGNSLDXL

SEQ ID NO: 351 - protein, 8 aa, Artificial Sequence
  Description of Artificial Sequence: Synthetic Peptide
  SITE (7)..(7): Xaa is A, C, F, G, H, I, K, M, N, P, Q, R, T, V, W, or Y
AGNSIRXI

SEQ ID NO: 352 - protein, 8 aa, Artificial Sequence
  Description of Artificial Sequence: Synthetic Peptide
  SITE (7)..(7): Xaa is A, C, E, K, M, P, S, W, or Y
AGNSLRXI

SEQ ID NO: 353 - protein, 8 aa, Artificial Sequence
  Description of Artificial Sequence: Synthetic Peptide
  SITE (7)..(7): Xaa is A, E, G, H, I, K, L, N, T, V, or W
AGNSIRXL

SEQ ID NO: 354 - protein, 8 aa, Artificial Sequence
  Description of Artificial Sequence: Synthetic Peptide
  SITE (7)..(7): Xaa is C, D, F, K, M, W, or Y
AGNSLRXL

SEQ ID NO: 355 - protein, 8 aa, Artificial Sequence
  Description of Artificial Sequence: Synthetic Peptide
  SITE (7)..(7): Xaa is C, D, E, F, G, L, M, N, P, R, W, or Y
AGNSISXI

SEQ ID NO: 356 - protein, 8 aa, Artificial Sequence
  Description of Artificial Sequence: Synthetic Peptide
  SITE (7)..(7): Xaa is C, H, L, P, Q, V, or W
AGNSLSXI

SEQ ID NO: 357 - protein, 8 aa, Artificial Sequence
  Description of Artificial Sequence: Synthetic Peptide
  SITE (7)..(7): Xaa is C, H, K, V, or W
AGNSISXL

SEQ ID NO: 358 - protein, 8 aa, Artificial Sequence
  Description of Artificial Sequence: Synthetic Peptide
  SITE (7)..(7): Xaa is C, D, E, F, G, H, I, K, M, P, R, T, or V
AGNSLSXL

SEQ ID NO: 359 - protein, 8 aa, Artificial Sequence
  Description of Artificial Sequence: Synthetic Peptide
  SITE (7)..(7): Xaa is D, E, F, H, K, N, P, R, T, or W
AGSDIDXI

SEQ ID NO: 360 - protein, 8 aa, Artificial Sequence
  Description of Artificial Sequence: Synthetic Peptide
  SITE (7)..(7): Xaa is C, E, F, K, N, S, or W
AGSDLDXI

SEQ ID NO: 361 - protein, 8 aa, Artificial Sequence
  Description of Artificial Sequence: Synthetic Peptide
  SITE (7)..(7): Xaa is K, M, or W
AGSDIDXL

SEQ ID NO: 362 - protein, 8 aa, Artificial Sequence
  Description of Artificial Sequence: Synthetic Peptide
  SITE (7)..(7): Xaa is C, H, or Y
AGSDLDXL

SEQ ID NO: 363 - protein, 8 aa, Artificial Sequence
  Description of Artificial Sequence: Synthetic Peptide
  SITE (7)..(7): Xaa is D, P, Q, R, S, W, or Y
AGSDIRXI

SEQ ID NO: 364 - protein, 8 aa, Artificial Sequence
  Description of Artificial Sequence: Synthetic Peptide
  SITE (7)..(7): Xaa is C, D, E, F, I, K, M, R, T, V, W, or Y
AGSDLRXI

SEQ ID NO: 365 - protein, 8 aa, Artificial Sequence
  Description of Artificial Sequence: Synthetic Peptide
  SITE (7)..(7): Xaa is C, L, M, N, Q, R, or W
AGSDIRXL

SEQ ID NO: 366 - protein, 8 aa, Artificial Sequence
  Description of Artificial Sequence: Synthetic Peptide
  SITE (7)..(7): Xaa is C, N, or Y
AGSDLRXL

SEQ ID NO: 367 - protein, 8 aa, Artificial Sequence
  Description of Artificial Sequence: Synthetic Peptide
  SITE (7)..(7): Xaa is C, E, I, L, P, Q, R, S, or W
AGSDISXI

SEQ ID NO: 368 - protein, 8 aa, Artificial Sequence
  Description of Artificial Sequence: Synthetic Peptide
  SITE (7)..(7): Xaa is C, F, M, P, W, or Y
AGSDLSXI

SEQ ID NO: 369 - protein, 8 aa, Artificial Sequence
  Description of Artificial Sequence: Synthetic Peptide
  SITE (7)..(7): Xaa is A, C, E, M, or W
AGSDISXL

SEQ ID NO: 370 - protein, 8 aa, Artificial Sequence
  Description of Artificial Sequence: Synthetic Peptide
  SITE (7)..(7): Xaa is C, D, G, H, K, N, P, Q, S, V, or W
AGSEIDXI

SEQ ID NO: 371 - protein, 8 aa, Artificial Sequence
  Description of Artificial Sequence: Synthetic Peptide
  SITE (7)..(7): Xaa is C, D, F, L, M, W, or Y
AGSELDXI

SEQ ID NO: 372 - protein, 8 aa, Artificial Sequence
  Description of Artificial Sequence: Synthetic Peptide
  SITE (7)..(7): Xaa is C, E, G, H, M, N, or W
AGSEIDXL

SEQ ID NO: 373 - protein, 8 aa, Artificial Sequence
  Description of Artificial Sequence: Synthetic Peptide
  SITE (7)..(7): Xaa is H, M, or Y
AGSELDXL

SEQ ID NO: 374 - protein, 8 aa, Artificial Sequence
  Description of Artificial Sequence: Synthetic Peptide
  SITE (7)..(7): Xaa is H, I, L, M, P, Q, W, or Y
AGSEIRXI

SEQ ID NO: 375 - protein, 8 aa, Artificial Sequence
  Description of Artificial Sequence: Synthetic Peptide
  SITE (7)..(7): Xaa is C, D, F, M, N, S, or V
AGSELRXI

SEQ ID NO: 376 - protein, 8 aa, Artificial Sequence
  Description of Artificial Sequence: Synthetic Peptide
  SITE (7)..(7): Xaa is C, E, F, H, I, or W
AGSEIRXL

SEQ ID NO: 377 - protein, 8 aa, Artificial Sequence
  Description of Artificial Sequence: Synthetic Peptide
  SITE (7)..(7): Xaa is C, or M
AGSELRXL

SEQ ID NO: 378 - protein, 8 aa, Artificial Sequence
  Description of Artificial Sequence: Synthetic Peptide
  SITE (7)..(7): Xaa is A, C, D, F, I, K, M, Q, R, T, W, or Y
AGSEISXI

SEQ ID NO: 379 - protein, 8 aa, Artificial Sequence
  Description of Artificial Sequence: Synthetic Peptide
  SITE (7)..(7): Xaa is A, C, F, G, K, M, N, P, Q, T, or W
AGSELSXI

SEQ ID NO: 380 - protein, 8 aa, Artificial Sequence
  Description of Artificial Sequence: Synthetic Peptide
  SITE (7)..(7): Xaa is C, F, H, M, or W
AGSEISXL

SEQ ID NO: 381 - protein, 8 aa, Artificial Sequence
  Description of Artificial Sequence: Synthetic Peptide
  SITE (7)..(7): Xaa is C, or Q
AGSELSXL

SEQ ID NO: 382 - protein, 8 aa, Artificial Sequence
  Description of Artificial Sequence: Synthetic Peptide
  SITE (7)..(7): Xaa is A, C, F, G, H, K, N, P, Q, S, T, V, or W
AGSNIDXI

SEQ ID NO: 383 - protein, 8 aa, Artificial Sequence
  Description of Artificial Sequence: Synthetic Peptide
  SITE (7)..(7): Xaa is F, G, I, K, N, R, T, or W
AGSNLDXI

SEQ ID NO: 384 - protein, 8 aa, Artificial Sequence
  Description of Artificial Sequence: Synthetic Peptide
  SITE (7)..(7): Xaa is C, F, H, I, N, P, R, V, or W
AGSNIDXL

SEQ ID NO: 385 - protein, 8 aa, Artificial Sequence
  Description of Artificial Sequence: Synthetic Peptide
  SITE (7)..(7): Xaa is C, F, I, M, N, W, or Y
AGSNLDXL

SEQ ID NO: 386 - protein, 8 aa, Artificial Sequence
  Description of Artificial Sequence: Synthetic Peptide
  SITE (7)..(7): Xaa is A, C, D, F, G, H, I, M, N, P, Q, S, T, or W
AGSNIRXI

SEQ ID NO: 387 - protein, 8 aa, Artificial Sequence
  Description of Artificial Sequence: Synthetic Peptide
  SITE (7)..(7): Xaa is C, D, E, F, H, I, L, M, P, T, W, or Y
AGSNLRXI

SEQ ID NO: 388 - protein, 8 aa, Artificial Sequence
  Description of Artificial Sequence: Synthetic Peptide
  SITE (7)..(7): Xaa is A, C, D, F, G, H, I, M, N, P, Q, S, T, OR W
AGSNIRXI

SEQ ID NO: 389 - protein, 8 aa, Artificial Sequence
  Description of Artificial Sequence: Synthetic Peptide
  SITE (7)..(7): Xaa is C, D, E, F, H, I, L, M, P, T, W, or Y
AGSNLRXI

SEQ ID NO: 390 - protein, 8 aa, Artificial Sequence
  Description of Artificial Sequence: Synthetic Peptide
  SITE (7)..(7): Xaa is A, C, G, H, N, R, S, T, or W
AGSNIRXL

SEQ ID NO: 391 - protein, 8 aa, Artificial Sequence
  Description of Artificial Sequence: Synthetic Peptide
  SITE (7)..(7): Xaa is C, D, H, M, P, V, or W
AGSNLRXL

SEQ ID NO: 392 - protein, 8 aa, Artificial Sequence
  Description of Artificial Sequence: Synthetic Peptide
  SITE (7)..(7): Xaa is A, C, G, H, N, R, S, T, or W
AGSNIRXL

SEQ ID NO: 393 - protein, 8 aa, Artificial Sequence
  Description of Artificial Sequence: Synthetic Peptide
  SITE (7)..(7): Xaa is C, D, H, M, P, V, or W
AGSNLRXL

SEQ ID NO: 394 - protein, 8 aa, Artificial Sequence
  Description of Artificial Sequence: Synthetic Peptide
  SITE (7)..(7): Xaa is A, C, E, H, M, N, Q, S, T, V, or W
AGSNISXI

SEQ ID NO: 395 - protein, 8 aa, Artificial Sequence
  Description of Artificial Sequence: Synthetic Peptide
  SITE (7)..(7): Xaa is C, L, M, V, or Y
AGSNLSXI

SEQ ID NO: 396 - protein, 8 aa, Artificial Sequence
  Description of Artificial Sequence: Synthetic Peptide
  SITE (7)..(7): Xaa is C, H, M, W, or Y
AGSNISXL

SEQ ID NO: 397 - protein, 8 aa, Artificial Sequence
  Description of Artificial Sequence: Synthetic Peptide
  SITE (7)..(7): Xaa is C, M, Q, or W
AGSNLSXL

SEQ ID NO: 398 - protein, 8 aa, Artificial Sequence
  Description of Artificial Sequence: Synthetic Peptide
  SITE (7)..(7): Xaa is C, D, G, H, I, K, L, M, N, P, Q, R, W, or Y
AGSQIDXI

SEQ ID NO: 399 - protein, 8 aa, Artificial Sequence
  Description of Artificial Sequence: Synthetic Peptide
  SITE (7)..(7): Xaa is D, F, G, I, K, M, N, P, R, S, T, V, W, or Y
AGSQLDXI

SEQ ID NO: 400 - protein, 8 aa, Artificial Sequence
  Description of Artificial Sequence: Synthetic Peptide
  SITE (7)..(7): Xaa is C, D, F, G, K, P, Q, S, or W
AGSQIDXL

SEQ ID NO: 401 - protein, 8 aa, Artificial Sequence
  Description of Artificial Sequence: Synthetic Peptide
  SITE (7)..(7): Xaa is F, G, H, M, or T
AGSQLDXL

SEQ ID NO: 402 - protein, 8 aa, Artificial Sequence
  Description of Artificial Sequence: Synthetic Peptide
  SITE (7)..(7): Xaa is C, D, G, H, K, L, M, Q, R, S, T, V, W, or Y
AGSQIRXI

SEQ ID NO: 403 - protein, 8 aa, Artificial Sequence
  Description of Artificial Sequence: Synthetic Peptide
  SITE (7)..(7): Xaa is A, C, D, F, M, P, Q, V, or W
AGSQLRXI

SEQ ID NO: 404 - protein, 8 aa, Artificial Sequence
  Description of Artificial Sequence: Synthetic Peptide
  SITE (7)..(7): Xaa is D, F, I, M, N, P, Q, T, V, W, or Y
AGSQIRXL

SEQ ID NO: 405 - protein, 8 aa, Artificial Sequence
  Description of Artificial Sequence: Synthetic Peptide
  SITE (7)..(7): Xaa is C, E, H, I, M, W, or Y
AGSQLRXL

SEQ ID NO: 406 - protein, 8 aa, Artificial Sequence
  Description of Artificial Sequence: Synthetic Peptide
  SITE (7)..(7): Xaa is C, E, F, H, M, N, Q, S, V, W, or Y
AGSQISXI

SEQ ID NO: 407 - protein, 8 aa, Artificial Sequence
  Description of Artificial Sequence: Synthetic Peptide
  SITE (7)..(7): Xaa is A, F, G, H, I, K, N, P, R, W, or Y
AGSQLSXI

SEQ ID NO: 408 - protein, 8 aa, Artificial Sequence
  Description of Artificial Sequence: Synthetic Peptide
  SITE (7)..(7): Xaa is C, D, G, H, I, K, M, N, T, V, or Y
AGSQISXL

SEQ ID NO: 409 - protein, 8 aa, Artificial Sequence
  Description of Artificial Sequence: Synthetic Peptide
  SITE (7)..(7): Xaa is C, F, H, I, M, N, R, or W
AGSQLSXL

SEQ ID NO: 410 - protein, 8 aa, Artificial Sequence
  Description of Artificial Sequence: Synthetic Peptide
  SITE (7)..(7): Xaa is C, D, E, H, I, K, N, P, R, or W
AGSSIDXI

SEQ ID NO: 411 - protein, 8 aa, Artificial Sequence
  Description of Artificial Sequence: Synthetic Peptide
  SITE (7)..(7): Xaa is C, D, F, I, L, M, S, W, or Y
AGSSLDXI

SEQ ID NO: 412 - protein, 8 aa, Artificial Sequence
  Description of Artificial Sequence: Synthetic Peptide
  SITE (7)..(7): Xaa is C, F, H, K, L, T, or Y
AGSSIDXL

SEQ ID NO: 413 - protein, 8 aa, Artificial Sequence
  Description of Artificial Sequence: Synthetic Peptide
  SITE (7)..(7): Xaa is H, N, or Y
AGSSLDXL

SEQ ID NO: 414 - protein, 8 aa, Artificial Sequence
  Description of Artificial Sequence: Synthetic Peptide
  SITE (7)..(7): Xaa is C, E, G, K, L, M, N, P, Q, R, T, W, or Y
AGSSIRXI

SEQ ID NO: 415 - protein, 8 aa, Artificial Sequence
  Description of Artificial Sequence: Synthetic Peptide
  SITE (7)..(7): Xaa is C, F, H, I, M, or W
AGSSLRXI

SEQ ID NO: 416 - protein, 8 aa, Artificial Sequence
  Description of Artificial Sequence: Synthetic Peptide
  SITE (7)..(7): Xaa is A, C, D, H, M, or T
AGSSIRXL

SEQ ID NO: 417 - protein, 8 aa, Artificial Sequence
  Description of Artificial Sequence: Synthetic Peptide
  SITE (7)..(7): Xaa is C, M, or Y
AGSSLRXL

SEQ ID NO: 418 - protein, 8 aa, Artificial Sequence
  Description of Artificial Sequence: Synthetic Peptide
  SITE (7)..(7): Xaa is C, H, W, or Y
AGSSISXI

SEQ ID NO: 419 - protein, 8 aa, Artificial Sequence
  Description of Artificial Sequence: Synthetic Peptide
  SITE (7)..(7): Xaa is C, Q, or Y
AGSSLSXI

SEQ ID NO: 420 - protein, 8 aa, Artificial Sequence
  Description of Artificial Sequence: Synthetic Peptide
  SITE (7)..(7): Xaa is C, K, or Y
AGSSISXL

SEQ ID NO: 421 - protein, 8 aa, Artificial Sequence
  Description of Artificial Sequence: Synthetic Peptide
AGSSLSCL

SEQ ID NO: 422 - protein, 8 aa, Artificial Sequence
  Description of Artificial Sequence: Synthetic Peptide
  SITE (7)..(7): Xaa is C, F, I, P, T, V, W, or Y
AKADIDXI

SEQ ID NO: 423 - protein, 8 aa, Artificial Sequence
  Description of Artificial Sequence: Synthetic Peptide
  SITE (7)..(7): Xaa is E, F, H, P, W, or Y
AKADLDXI

SEQ ID NO: 424 - protein, 8 aa, Artificial Sequence
  Description of Artificial Sequence: Synthetic Peptide
  SITE (7)..(7): Xaa is C, F, H, I, M, N, or P
AKADIDXL

SEQ ID NO: 425 - protein, 8 aa, Artificial Sequence
  Description of Artificial Sequence: Synthetic Peptide
  SITE (7)..(7): Xaa is C, H, or I
AKADLDXL

SEQ ID NO: 426 - protein, 8 aa, Artificial Sequence
  Description of Artificial Sequence: Synthetic Peptide
  SITE (7)..(7): Xaa is C, D, E, F, G, I, L, M, P, T, V, W, or Y
AKADIRXI

SEQ ID NO: 427 - protein, 8 aa, Artificial Sequence
  Description of Artificial Sequence: Synthetic Peptide
  SITE (7)..(7): Xaa is F, H, I, M, N, Q, V, W, or Y
AKADLRXI

SEQ ID NO: 428 - protein, 8 aa, Artificial Sequence
  Description of Artificial Sequence: Synthetic Peptide
  SITE (7)..(7): Xaa is C, F, G, H, I, N, P, S, or T
AKADIRXL

SEQ ID NO: 429 - protein, 8 aa, Artificial Sequence
  Description of Artificial Sequence: Synthetic Peptide
  SITE (7)..(7): Xaa is C, H, L, M, or W
AKADLRXL

SEQ ID NO: 430 - protein, 8 aa, Artificial Sequence
  Description of Artificial Sequence: Synthetic Peptide
  SITE (7)..(7): Xaa is C, E, H, I, M, P, Q, or W
AKADISXI

SEQ ID NO: 431 - protein, 8 aa, Artificial Sequence
  Description of Artificial Sequence: Synthetic Peptide
  SITE (7)..(7): Xaa is C, E, F, H, I, M, P, Q, V, W, or Y
AKADLSXI

SEQ ID NO: 432 - protein, 8 aa, Artificial Sequence
  Description of Artificial Sequence: Synthetic Peptide
  SITE (7)..(7): Xaa is C, D, F, I, P, Q, T, or Y
AKADISXL

SEQ ID NO: 433 - protein, 8 aa, Artificial Sequence
  Description of Artificial Sequence: Synthetic Peptide
  SITE (7)..(7): Xaa is C, Q, or W
AKADLSXL

SEQ ID NO: 434 - protein, 8 aa, Artificial Sequence
  Description of Artificial Sequence: Synthetic Peptide
  SITE (7)..(7): Xaa is C, F, P, or W
AKAEIDXI

SEQ ID NO: 435 - protein, 8 aa, Artificial Sequence
  Description of Artificial Sequence: Synthetic Peptide
  SITE (7)..(7): Xaa is C, H, M, or P
AKAELDXI

SEQ ID NO: 436 - protein, 8 aa, Artificial Sequence
  Description of Artificial Sequence: Synthetic Peptide
  SITE (7)..(7): Xaa is C or H
AKAEIDXL

SEQ ID NO: 437 - protein, 8 aa, Artificial Sequence
  Description of Artificial Sequence: Synthetic Peptide
  SITE (7)..(7): Xaa is F, C, E, H, I, M, N, Q, W, or Y
AKAELDXL

SEQ ID NO: 438 - protein, 8 aa, Artificial Sequence
  Description of Artificial Sequence: Synthetic Peptide
  SITE (7)..(7): Xaa is C, F, H, I, L, M, P, Q, T, or W
AKAEIRXI

SEQ ID NO: 439 - protein, 8 aa, Artificial Sequence
  Description of Artificial Sequence: Synthetic Peptide
  SITE (7)..(7): Xaa is C, H, I, M, N, P, T, V, W, or Y
AKAELRXI

SEQ ID NO: 440 - protein, 8 aa, Artificial Sequence
  Description of Artificial Sequence: Synthetic Peptide
  SITE (7)..(7): Xaa is C, F, I, P, S, V, or W
AKAEIRXL

SEQ ID NO: 441 - protein, 8 aa, Artificial Sequence
  Description of Artificial Sequence: Synthetic Peptide
  SITE (7)..(7): Xaa is D, H, I, M, W, or Y
AKAELRXL

SEQ ID NO: 442 - protein, 8 aa, Artificial Sequence
  Description of Artificial Sequence: Synthetic Peptide
  SITE (7)..(7): Xaa is G, K, P, R, or T
AKAEISXI

SEQ ID NO: 443 - protein, 8 aa, Artificial Sequence
  Description of Artificial Sequence: Synthetic Peptide
  SITE (7)..(7): Xaa is C, F, H, M, R, or V
AKAELSXI

SEQ ID NO: 444 - protein, 8 aa, Artificial Sequence
  Description of Artificial Sequence: Synthetic Peptide
  SITE (7)..(7): Xaa is F, I, M, N, P, T, or V
AKAEISXL

SEQ ID NO: 445 - protein, 8 aa, Artificial Sequence
  Description of Artificial Sequence: Synthetic Peptide
  SITE (7)..(7): Xaa is C, F, N, P, or W
AKAELSXL

SEQ ID NO: 446 - protein, 8 aa, Artificial Sequence
  Description of Artificial Sequence: Synthetic Peptide
  SITE (7)..(7): Xaa is C, H, K, L, M, N, P, Q, S, W, or Y
AKANIDXI

SEQ ID NO: 447 - protein, 8 aa, Artificial Sequence
  Description of Artificial Sequence: Synthetic Peptide
  SITE (7)..(7): Xaa is C, F, G, H, M, or P
AKANLDXI

SEQ ID NO: 448 - protein, 8 aa, Artificial Sequence
  Description of Artificial Sequence: Synthetic Peptide
  SITE (7)..(7): Xaa is C, L, N, Q, or W
AKANIDXL

SEQ ID NO: 449 - protein, 8 aa, Artificial Sequence
  Description of Artificial Sequence: Synthetic Peptide
  SITE (7)..(7): Xaa is F, M, P, or Q
AKANLDXL

SEQ ID NO: 450 - protein, 8 aa, Artificial Sequence
  Description of Artificial Sequence: Synthetic Peptide
  SITE (7)..(7): Xaa is A, C, D, H, K, L, M, P, Q, R, T, or W
AKANIRXI

SEQ ID NO: 451 - protein, 8 aa, Artificial Sequence
  Description of Artificial Sequence: Synthetic Peptide
  SITE (7)..(7): Xaa is C, G, I, L, M, Q, or Y
AKANLRXI

SEQ ID NO: 452 - protein, 8 aa, Artificial Sequence
  Description of Artificial Sequence: Synthetic Peptide
  SITE (7)..(7): Xaa is A, C, D, E, G, H, K, M, N, P, Q, S, or W
AKANIRXL

SEQ ID NO: 453 - protein, 8 aa, Artificial Sequence
  Description of Artificial Sequence: Synthetic Peptide
  SITE (7)..(7): Xaa is A, C, F, H, I, T, W, or Y
AKANLRXL

SEQ ID NO: 454 - protein, 8 aa, Artificial Sequence
  Description of Artificial Sequence: Synthetic Peptide
  SITE (7)..(7): Xaa is C, F, K, M, P, Q, T, W, or Y
AKANISXI

SEQ ID NO: 455 - protein, 8 aa, Artificial Sequence
  Description of Artificial Sequence: Synthetic Peptide
  SITE (7)..(7): Xaa is C, H, I, M, N, P, T, W, or Y
AKANLSXI

SEQ ID NO: 456 - protein, 8 aa, Artificial Sequence
  Description of Artificial Sequence: Synthetic Peptide
  SITE (7)..(7): Xaa is C, G ,I, L ,M, N, P, S, or T
AKANISXL

SEQ ID NO: 457 - protein, 8 aa, Artificial Sequence
  Description of Artificial Sequence: Synthetic Peptide
  SITE (7)..(7): Xaa is C, F, G, W, or Y
AKANLSXL

SEQ ID NO: 458 - protein, 8 aa, Artificial Sequence
  Description of Artificial Sequence: Synthetic Peptide
  SITE (7)..(7): Xaa is C, E, F, G, H, I, L, M, N, P, R, S, T, W, or Y
AKAQIDXI

SEQ ID NO: 459 - protein, 8 aa, Artificial Sequence
  Description of Artificial Sequence: Synthetic Peptide
  SITE (7)..(7): Xaa is C, F, H, I, P, V, W, or Y
AKAQLDXI

SEQ ID NO: 460 - protein, 8 aa, Artificial Sequence
  Description of Artificial Sequence: Synthetic Peptide
  SITE (7)..(7): Xaa is C, F, H, L, M, P, or W
AKAQIDXL

SEQ ID NO: 461 - protein, 8 aa, Artificial Sequence
  Description of Artificial Sequence: Synthetic Peptide
  SITE (7)..(7): Xaa is C, F, I, M, W
AKAQLDXL

SEQ ID NO: 462 - protein, 8 aa, Artificial Sequence
  Description of Artificial Sequence: Synthetic Peptide
  SITE (7)..(7): Xaa is C, D, H, I, L, M, P, Q, V, W or Y
AKAQIRXI

SEQ ID NO: 463 - protein, 8 aa, Artificial Sequence
  Description of Artificial Sequence: Synthetic Peptide
  SITE (7)..(7): Xaa is C, F, G, I, M, N, P, W, or Y
AKAQLRXI

SEQ ID NO: 464 - protein, 8 aa, Artificial Sequence
  Description of Artificial Sequence: Synthetic Peptide
  SITE (7)..(7): Xaa is C, D, H, I, K, M, N, P, Q, S, T, V, or W
AKAQIRXL

SEQ ID NO: 465 - protein, 8 aa, Artificial Sequence
  Description of Artificial Sequence: Synthetic Peptide
  SITE (7)..(7): Xaa is C, F, I, L, M, Q, V, or W
AKAQLRXL

SEQ ID NO: 466 - protein, 8 aa, Artificial Sequence
  Description of Artificial Sequence: Synthetic Peptide
  SITE (7)..(7): Xaa is C, D, E, F, H, I, M, P, R, V, or Y
AKAQISXI

SEQ ID NO: 467 - protein, 8 aa, Artificial Sequence
  Description of Artificial Sequence: Synthetic Peptide
  SITE (7)..(7): Xaa is C, D, N, T, W, or Y
AKAQLSXI

SEQ ID NO: 468 - protein, 8 aa, Artificial Sequence
  Description of Artificial Sequence: Synthetic Peptide
  SITE (7)..(7): Xaa is C, D, F, H, I, K, M, V, or W
AKAQISXL

SEQ ID NO: 469 - protein, 8 aa, Artificial Sequence
  Description of Artificial Sequence: Synthetic Peptide
  SITE (7)..(7): Xaa is D, F, M, N, W, or Y
AKAQLSXL

SEQ ID NO: 470 - protein, 8 aa, Artificial Sequence
  Description of Artificial Sequence: Synthetic Peptide
  SITE (7)..(7): Xaa is C, F, H, K, P, R, T, V, or W
AKASIDXI

SEQ ID NO: 471 - protein, 8 aa, Artificial Sequence
  Description of Artificial Sequence: Synthetic Peptide
  SITE (7)..(7): Xaa is H, M, P, or W
AKASLDXI

SEQ ID NO: 472 - protein, 8 aa, Artificial Sequence
  Description of Artificial Sequence: Synthetic Peptide
  SITE (7)..(7): Xaa is C, H, M, N, or W
AKASIDXL

SEQ ID NO: 473 - protein, 8 aa, Artificial Sequence
  Description of Artificial Sequence: Synthetic Peptide
  SITE (7)..(7): Xaa is C or Y
AKASLDXL

SEQ ID NO: 474 - protein, 8 aa, Artificial Sequence
  Description of Artificial Sequence: Synthetic Peptide
  SITE (7)..(7): Xaa is A, C, E, G, H, I, L, N, P, Q, R, T, or V
AKASIRXI

SEQ ID NO: 475 - protein, 8 aa, Artificial Sequence
  Description of Artificial Sequence: Synthetic Peptide
  SITE (7)..(7): Xaa is C, H, I, M, P, Q, V, or W
AKASLRXI

SEQ ID NO: 476 - protein, 8 aa, Artificial Sequence
  Description of Artificial Sequence: Synthetic Peptide
  SITE (7)..(7): Xaa is C, F, H, L, P, or W
AKASIRXL

SEQ ID NO: 477 - protein, 8 aa, Artificial Sequence
  Description of Artificial Sequence: Synthetic Peptide
  SITE (7)..(7): Xaa is C, F, M, V, or W
AKASLRXL

SEQ ID NO: 478 - protein, 8 aa, Artificial Sequence
  Description of Artificial Sequence: Synthetic Peptide
  SITE (7)..(7): Xaa is I, L, M, P, Q, W, or Y
AKASISXI

SEQ ID NO: 479 - protein, 8 aa, Artificial Sequence
  Description of Artificial Sequence: Synthetic Peptide
  SITE (7)..(7): Xaa is H, M, N, Q, Y, or W
AKASLSXI

SEQ ID NO: 480 - protein, 8 aa, Artificial Sequence
  Description of Artificial Sequence: Synthetic Peptide
  SITE (7)..(7): Xaa is C, F, I, M, N, R, W, or Y
AKASISXL

SEQ ID NO: 481 - protein, 7 aa, Artificial Sequence
  Description of Artificial Sequence: Synthetic Peptide
  SITE (7)..(7): Xaa is C, M, P, or Y
AKASLSL

SEQ ID NO: 482 - protein, 8 aa, Artificial Sequence
  Description of Artificial Sequence: Synthetic Peptide
  SITE (7)..(7): Xaa is C, E, H, I, L, M, S, or W
AKGDIDXI

SEQ ID NO: 483 - protein, 8 aa, Artificial Sequence
  Description of Artificial Sequence: Synthetic Peptide
  SITE (7)..(7): Xaa is C, F, H, M, N, P, S, W, or Y
AKGDLDXI

SEQ ID NO: 484 - protein, 8 aa, Artificial Sequence
  Description of Artificial Sequence: Synthetic Peptide
  SITE (7)..(7): Xaa is C, E, F, G, H, K, L, M, Q, or Y
AKGDIDXL

SEQ ID NO: 485 - protein, 8 aa, Artificial Sequence
  Description of Artificial Sequence: Synthetic Peptide
  SITE (7)..(7): Xaa is C, H, M, P, Q, W, or Y
AKGDLDXL

SEQ ID NO: 486 - protein, 8 aa, Artificial Sequence
  Description of Artificial Sequence: Synthetic Peptide
  SITE (7)..(7): Xaa is A, C, E, G, H, I, K, L, V, W, or Y
AKGDIRXI

SEQ ID NO: 487 - protein, 8 aa, Artificial Sequence
  Description of Artificial Sequence: Synthetic Peptide
  SITE (7)..(7): Xaa is A, C, D, F, G, H, K, M, P, R, V, W, or Y
AKGDLRXI

SEQ ID NO: 488 - protein, 8 aa, Artificial Sequence
  Description of Artificial Sequence: Synthetic Peptide
  SITE (7)..(7): Xaa is C, E, G, K, M, N, P, Q, R, T, or Y
AKGDIRXL

SEQ ID NO: 489 - protein, 8 aa, Artificial Sequence
  Description of Artificial Sequence: Synthetic Peptide
  SITE (7)..(7): Xaa is C, D, H, K, S, or Y
AKGDLRXL

SEQ ID NO: 490 - protein, 8 aa, Artificial Sequence
  Description of Artificial Sequence: Synthetic Peptide
  SITE (7)..(7): Xaa is E, F, H, M, R, T, V, or W
AKGDISXI

SEQ ID NO: 491 - protein, 8 aa, Artificial Sequence
  Description of Artificial Sequence: Synthetic Peptide
  SITE (7)..(7): Xaa is C, D, H, M, T, or Y
AKGDLSXI

SEQ ID NO: 492 - protein, 8 aa, Artificial Sequence
  Description of Artificial Sequence: Synthetic Peptide
  SITE (7)..(7): Xaa is C, D, H, or W
AKGDISXL

SEQ ID NO: 493 - protein, 8 aa, Artificial Sequence
  Description of Artificial Sequence: Synthetic Peptide
  SITE (7)..(7): Xaa is C, R, or Y
AKGDLSXL

SEQ ID NO: 494 - protein, 8 aa, Artificial Sequence
  Description of Artificial Sequence: Synthetic Peptide
  SITE (7)..(7): Xaa is C, D, M, W, or Y
AKGEIDXI

SEQ ID NO: 495 - protein, 8 aa, Artificial Sequence
  Description of Artificial Sequence: Synthetic Peptide
  SITE (7)..(7): Xaa is C, H, I, M, S, T, W, or Y
AKGELDXI

SEQ ID NO: 496 - protein, 8 aa, Artificial Sequence
  Description of Artificial Sequence: Synthetic Peptide
  SITE (7)..(7): Xaa is D, H, M, S, T, or Y
AKGEIDXL

SEQ ID NO: 497 - protein, 8 aa, Artificial Sequence
  Description of Artificial Sequence: Synthetic Peptide
  SITE (7)..(7): Xaa is D, I, M, or S
AKGELDXL

SEQ ID NO: 498 - protein, 8 aa, Artificial Sequence
  Description of Artificial Sequence: Synthetic Peptide
  SITE (7)..(7): Xaa is E, F, G, K, L, P, T, W, or Y
AKGEIRXI

SEQ ID NO: 499 - protein, 8 aa, Artificial Sequence
  Description of Artificial Sequence: Synthetic Peptide
  SITE (7)..(7): Xaa is D, F, G, K, L, M, N, P, or W
AKGELRXI

SEQ ID NO: 500 - protein, 8 aa, Artificial Sequence
  Description of Artificial Sequence: Synthetic Peptide
  SITE (7)..(7): Xaa is C, D, F, I, M, Q, W, or Y
AKGEIRXL

SEQ ID NO: 501 - protein, 8 aa, Artificial Sequence
  Description of Artificial Sequence: Synthetic Peptide
  SITE (7)..(7): Xaa is C, H, or Q
AKGELRXL

SEQ ID NO: 502 - protein, 8 aa, Artificial Sequence
  Description of Artificial Sequence: Synthetic Peptide
  SITE (7)..(7): Xaa is C, F, H, I, L, M, Q, S, and W
AKGEISXI

SEQ ID NO: 503 - protein, 8 aa, Artificial Sequence
  Description of Artificial Sequence: Synthetic Peptide
  SITE (7)..(7): Xaa is C, D, F, H, M, N, P, Q, T, W, and Y
AKGELSXI

SEQ ID NO: 504 - protein, 8 aa, Artificial Sequence
  Description of Artificial Sequence: Synthetic Peptide
  SITE (7)..(7): Xaa is C, H, K, M, R, T, and W
AKGEISXL

SEQ ID NO: 505 - protein, 8 aa, Artificial Sequence
  Description of Artificial Sequence: Synthetic Peptide
  SITE (7)..(7): Xaa is H, I, M, and V
AKGELSXL

SEQ ID NO: 506 - protein, 8 aa, Artificial Sequence
  Description of Artificial Sequence: Synthetic Peptide
  SITE (7)..(7): Xaa is C, D, G, H, M, N, P, Q, R, S, V, or W
AKGNIDXI

SEQ ID NO: 507 - protein, 8 aa, Artificial Sequence
  Description of Artificial Sequence: Synthetic Peptide
  SITE (7)..(7): Xaa is A, D, E, F, I, M, P, R, S, V, or W
AKGNLDXI

SEQ ID NO: 508 - protein, 8 aa, Artificial Sequence
  Description of Artificial Sequence: Synthetic Peptide
  SITE (7)..(7): Xaa is A, C, H, K, M, N, Q, or T
AKGNIDXL

SEQ ID NO: 509 - protein, 8 aa, Artificial Sequence
  Description of Artificial Sequence: Synthetic Peptide
  SITE (7)..(7): Xaa is C, I, V, or W
AKGNLDXL

SEQ ID NO: 510 - protein, 8 aa, Artificial Sequence
  Description of Artificial Sequence: Synthetic Peptide
  SITE (7)..(7): Xaa is A, C, E, F, H, L, M, N, P, Q, S, or W
AKGNIRXI

SEQ ID NO: 511 - protein, 8 aa, Artificial Sequence
  Description of Artificial Sequence: Synthetic Peptide
  SITE (7)..(7): Xaa is C, D, H, I, K, L, M, N, P, T, V, W, or Y
AKGNLRXI

SEQ ID NO: 512 - protein, 8 aa, Artificial Sequence
  Description of Artificial Sequence: Synthetic Peptide
  SITE (7)..(7): Xaa is A, C, H, K, M, N, P, R, T, W, or Y
AKGNIRXL

SEQ ID NO: 513 - protein, 8 aa, Artificial Sequence
  Description of Artificial Sequence: Synthetic Peptide
  SITE (7)..(7): Xaa is C, F, K, N, P, T, or W
AKGNLRXL

SEQ ID NO: 514 - protein, 8 aa, Artificial Sequence
  Description of Artificial Sequence: Synthetic Peptide
  SITE (7)..(7): Xaa is C, D, E, H, I, M, N, P, V, or W
AKGNISXI

SEQ ID NO: 515 - protein, 8 aa, Artificial Sequence
  Description of Artificial Sequence: Synthetic Peptide
  SITE (7)..(7): Xaa is C, F, H, M, N, P, T, V, or W
AKGNLSXI

SEQ ID NO: 516 - protein, 8 aa, Artificial Sequence
  Description of Artificial Sequence: Synthetic Peptide
  SITE (7)..(7): Xaa is C, D, G, H, K, M, P, Q, or T
AKGNISXL

SEQ ID NO: 517 - protein, 8 aa, Artificial Sequence
  Description of Artificial Sequence: Synthetic Peptide
  SITE (7)..(7): Xaa is D, F, H, M, N, or R
AKGNLSXL

SEQ ID NO: 518 - protein, 8 aa, Artificial Sequence
  Description of Artificial Sequence: Synthetic Peptide
  SITE (7)..(7): Xaa is A, C, E, F, H, K, L, P, T, or W
AKGQIDXI

SEQ ID NO: 519 - protein, 8 aa, Artificial Sequence
  Description of Artificial Sequence: Synthetic Peptide
  SITE (7)..(7): Xaa is C, E, F, G, H, L, M, Q, R, S, T, V, W, or Y
AKGQLDXI

SEQ ID NO: 520 - protein, 8 aa, Artificial Sequence
  Description of Artificial Sequence: Synthetic Peptide
  SITE (7)..(7): Xaa is C, E, M, N, Q, T, or W
AKGQIDXL

SEQ ID NO: 521 - protein, 8 aa, Artificial Sequence
  Description of Artificial Sequence: Synthetic Peptide
  SITE (7)..(7): Xaa is E, F, G, H, M, Q, S, or W
AKGQLDXL

SEQ ID NO: 522 - protein, 8 aa, Artificial Sequence
  Description of Artificial Sequence: Synthetic Peptide
  SITE (7)..(7): Xaa is A, C, E, F, G, H, K, L, P, T, V, W, or Y
AKGQIRXI

SEQ ID NO: 523 - protein, 8 aa, Artificial Sequence
  Description of Artificial Sequence: Synthetic Peptide
  SITE (7)..(7): Xaa is D, L, M, P, S, T, W, or Y
AKGQLRXI

SEQ ID NO: 524 - protein, 8 aa, Artificial Sequence
  Description of Artificial Sequence: Synthetic Peptide
  SITE (7)..(7): Xaa is A, C, D, E, F, H, I, L, N, P, Q, R, S, T, or W
AKGQIRXL

SEQ ID NO: 525 - protein, 8 aa, Artificial Sequence
  Description of Artificial Sequence: Synthetic Peptide
  SITE (7)..(7): Xaa is F, G, H, P, or W
AKGQLRXL

SEQ ID NO: 526 - protein, 8 aa, Artificial Sequence
  Description of Artificial Sequence: Synthetic Peptide
  SITE (7)..(7): Xaa is A, C, E, G, H, K, M, N, R, V, W, or Y
AKGQISXI

SEQ ID NO: 527 - protein, 8 aa, Artificial Sequence
  Description of Artificial Sequence: Synthetic Peptide
  SITE (7)..(7): Xaa is A, C, D, H, L, N, P, Q, R, S, W, or Y
AKGQLSXI

SEQ ID NO: 528 - protein, 8 aa, Artificial Sequence
  Description of Artificial Sequence: Synthetic Peptide
  SITE (7)..(7): Xaa is C, E, F, G, I, K, L, M, P, Q, T, V, W, or Y
AKGQISXL

SEQ ID NO: 529 - protein, 8 aa, Artificial Sequence
  Description of Artificial Sequence: Synthetic Peptide
  SITE (7)..(7): Xaa is F, H, M, V, W, or Y
AKGQLSXL

SEQ ID NO: 530 - protein, 8 aa, Artificial Sequence
  Description of Artificial Sequence: Synthetic Peptide
  SITE (7)..(7): Xaa is A, C, F, I, K, M, N, P, R, S, T, W, or Y
AKGSIDXI

SEQ ID NO: 531 - protein, 8 aa, Artificial Sequence
  Description of Artificial Sequence: Synthetic Peptide
  SITE (7)..(7): Xaa is D, M, P, R, T, or W
AKGSLDXI

SEQ ID NO: 532 - protein, 8 aa, Artificial Sequence
  Description of Artificial Sequence: Synthetic Peptide
  SITE (7)..(7): Xaa is A, C, F, K, P, Q, R, or T
AKGSIDXL

SEQ ID NO: 533 - protein, 8 aa, Artificial Sequence
  Description of Artificial Sequence: Synthetic Peptide
  SITE (7)..(7): Xaa is C, F, M, P, V, or Y
AKGSLDXL

SEQ ID NO: 534 - protein, 8 aa, Artificial Sequence
  Description of Artificial Sequence: Synthetic Peptide
  SITE (7)..(7): Xaa is A, C, D, G, H, I, K, L, M, P, Q, R, T, W, or Y
AKGSIRXI

SEQ ID NO: 535 - protein, 8 aa, Artificial Sequence
  Description of Artificial Sequence: Synthetic Peptide
  SITE (7)..(7): Xaa is A, F, G, H, I, K, L, M, N, Q, W, or Y
AKGSLRXI

SEQ ID NO: 536 - protein, 8 aa, Artificial Sequence
  Description of Artificial Sequence: Synthetic Peptide
  SITE (7)..(7): Xaa is C, D, E, H, I, L, M, N, P, R, T, V, W, or Y
AKGSIRXL

SEQ ID NO: 537 - protein, 8 aa, Artificial Sequence
  Description of Artificial Sequence: Synthetic Peptide
  SITE (7)..(7): Xaa is C, F, G, H, K, M, T, or Y
AKGSLRXL

SEQ ID NO: 538 - protein, 8 aa, Artificial Sequence
  Description of Artificial Sequence: Synthetic Peptide
  SITE (7)..(7): Xaa is A, C, F, I, K, M, N, P, R, S, T, W, or Y
AKGSISXI

SEQ ID NO: 539 - protein, 8 aa, Artificial Sequence
  Description of Artificial Sequence: Synthetic Peptide
  SITE (7)..(7): Xaa is C, E, H, I, K, N, P, S, or T
AKGSLSXI

SEQ ID NO: 540 - protein, 8 aa, Artificial Sequence
  Description of Artificial Sequence: Synthetic Peptide
  SITE (7)..(7): Xaa is C, D, E, H, I, L, M, N, P, R, T, V, W, or Y
AKGSISXL

SEQ ID NO: 541 - protein, 8 aa, Artificial Sequence
  Description of Artificial Sequence: Synthetic Peptide
  SITE (7)..(7): Xaa is H, M, N, or P
AKGSLSXL

SEQ ID NO: 542 - protein, 8 aa, Artificial Sequence
  Description of Artificial Sequence: Synthetic Peptide
  SITE (7)..(7): Xaa is C, D, E, H, N, or W
AKLDIDXI

SEQ ID NO: 543 - protein, 8 aa, Artificial Sequence
  Description of Artificial Sequence: Synthetic Peptide
  SITE (7)..(7): Xaa is G, H, I, M, T, V, or W
AKLDLDXI

SEQ ID NO: 544 - protein, 8 aa, Artificial Sequence
  Description of Artificial Sequence: Synthetic Peptide
  SITE (7)..(7): Xaa is C, H, N, P, Q. or S
AKLDIDXL

SEQ ID NO: 545 - protein, 8 aa, Artificial Sequence
  Description of Artificial Sequence: Synthetic Peptide
  SITE (7)..(7): Xaa is C, H, or I
AKLDLDXL

SEQ ID NO: 546 - protein, 8 aa, Artificial Sequence
  Description of Artificial Sequence: Synthetic Peptide
  SITE (7)..(7): Xaa is A, C, E, G, H, L, P, Q, R, W, or Y
AKLDIRXI

SEQ ID NO: 547 - protein, 8 aa, Artificial Sequence
  Description of Artificial Sequence: Synthetic Peptide
  SITE (7)..(7): Xaa is A, C, E, H, I, N, P, Q, or W
AKLDLRXI

SEQ ID NO: 548 - protein, 8 aa, Artificial Sequence
  Description of Artificial Sequence: Synthetic Peptide
  SITE (7)..(7): Xaa is C, D, G, H, P, Q, S, W, or Y
AKLDIRXL

SEQ ID NO: 549 - protein, 8 aa, Artificial Sequence
  Description of Artificial Sequence: Synthetic Peptide
  SITE (7)..(7): Xaa is C, D, K, M, N, S, or W
AKLDLRXL

SEQ ID NO: 550 - protein, 8 aa, Artificial Sequence
  Description of Artificial Sequence: Synthetic Peptide
  SITE (7)..(7): Xaa is C, D, H, I, K, M, N, w, or Y
AKLDISXI

SEQ ID NO: 551 - protein, 8 aa, Artificial Sequence
  Description of Artificial Sequence: Synthetic Peptide
  SITE (7)..(7): Xaa is C, F, H, I, M, or W
AKLDLSXI

SEQ ID NO: 552 - protein, 8 aa, Artificial Sequence
  Description of Artificial Sequence: Synthetic Peptide
  SITE (7)..(7): Xaa is C, F, H, M ,V, or Y
AKLDISXL

SEQ ID NO: 553 - protein, 8 aa, Artificial Sequence
  Description of Artificial Sequence: Synthetic Peptide
  SITE (7)..(7): Xaa is I, C, D, E, F, G, H, L, M, P, W, or Y
AKLDLSXL

SEQ ID NO: 554 - protein, 8 aa, Artificial Sequence
  Description of Artificial Sequence: Synthetic Peptide
  SITE (7)..(7): Xaa is C, F, R, T, V, W, or Y
AKLEIDXI

SEQ ID NO: 555 - protein, 8 aa, Artificial Sequence
  Description of Artificial Sequence: Synthetic Peptide
  SITE (7)..(7): Xaa is C, I, K, L, M, P, T, V, or W
AKLELDXI

SEQ ID NO: 556 - protein, 8 aa, Artificial Sequence
  Description of Artificial Sequence: Synthetic Peptide
  SITE (7)..(7): Xaa is C, F, P, Q, W, or Y
AKLEIDXL

SEQ ID NO: 557 - protein, 8 aa, Artificial Sequence
  Description of Artificial Sequence: Synthetic Peptide
  SITE (7)..(7): Xaa is C, H, M, N, P, S, or W
AKLELDXL

SEQ ID NO: 558 - protein, 8 aa, Artificial Sequence
  Description of Artificial Sequence: Synthetic Peptide
  SITE (7)..(7): Xaa is A, C, G, H, I, K, M, P, Q, R, S, T, V, W, or Y
AKLEIRXI

SEQ ID NO: 559 - protein, 8 aa, Artificial Sequence
  Description of Artificial Sequence: Synthetic Peptide
  SITE (7)..(7): Xaa is C, F, G, I, L, M, Q, S, T, V, W, or Y
AKLELRXI

SEQ ID NO: 560 - protein, 8 aa, Artificial Sequence
  Description of Artificial Sequence: Synthetic Peptide
  SITE (7)..(7): Xaa is C, G, M, Q, R, V, W, or Y
AKLEIRXL

SEQ ID NO: 561 - protein, 8 aa, Artificial Sequence
  Description of Artificial Sequence: Synthetic Peptide
  SITE (7)..(7): Xaa is C, F, G, H, L, M, Q, or W
AKLELRXL

SEQ ID NO: 562 - protein, 8 aa, Artificial Sequence
  Description of Artificial Sequence: Synthetic Peptide
  SITE (7)..(7): Xaa is C, G, H, I, K, L, M, P, T, V, or W
AKLEISXI

SEQ ID NO: 563 - protein, 8 aa, Artificial Sequence
  Description of Artificial Sequence: Synthetic Peptide
  SITE (7)..(7): Xaa is A, C, E, F, H, L, M, N, T, W, or Y
AKLELSXI

SEQ ID NO: 564 - protein, 8 aa, Artificial Sequence
  Description of Artificial Sequence: Synthetic Peptide
  SITE (7)..(7): Xaa is A, C, D, E, H, M, N, P, or W
AKLEISXL

SEQ ID NO: 565 - protein, 8 aa, Artificial Sequence
  Description of Artificial Sequence: Synthetic Peptide
  SITE (7)..(7): Xaa is F, G, M ,P, Q, or W
AKLELSXL

SEQ ID NO: 566 - protein, 8 aa, Artificial Sequence
  Description of Artificial Sequence: Synthetic Peptide
  SITE (7)..(7): Xaa is C, E, H, R, or W
AKLNIDXI

SEQ ID NO: 567 - protein, 8 aa, Artificial Sequence
  Description of Artificial Sequence: Synthetic Peptide
  SITE (7)..(7): Xaa is F, H, I, K, T, V, or W
AKLNLDXI

SEQ ID NO: 568 - protein, 8 aa, Artificial Sequence
  Description of Artificial Sequence: Synthetic Peptide
  SITE (7)..(7): Xaa is C, D, F, H, L, or P
AKLNIDXL

SEQ ID NO: 569 - protein, 8 aa, Artificial Sequence
  Description of Artificial Sequence: Synthetic Peptide
  SITE (7)..(7): Xaa is C, F, H, W, or Y
AKLNLDXL

SEQ ID NO: 570 - protein, 8 aa, Artificial Sequence
  Description of Artificial Sequence: Synthetic Peptide
  SITE (7)..(7): Xaa is C, H, I, K, L, M, P, Q, T, or Y
AKLNIRXI

SEQ ID NO: 571 - protein, 8 aa, Artificial Sequence
  Description of Artificial Sequence: Synthetic Peptide
  SITE (7)..(7): Xaa is C, F, I, K, L, M, N, Q, S, V, W, or Y
AKLNLRXI

SEQ ID NO: 572 - protein, 8 aa, Artificial Sequence
  Description of Artificial Sequence: Synthetic Peptide
  SITE (7)..(7): Xaa is C, D, F, G, H, I, K, L, M, M, P, R, S, T, V, W, or Y
AKLNIRXL

SEQ ID NO: 573 - protein, 8 aa, Artificial Sequence
  Description of Artificial Sequence: Synthetic Peptide
  SITE (7)..(7): Xaa is C, D, G, H, I ,K, M, N, or Y
AKLNLRXL

SEQ ID NO: 574 - protein, 8 aa, Artificial Sequence
  Description of Artificial Sequence: Synthetic Peptide
  SITE (7)..(7): Xaa is A, C, E, I, L, M, Q, T, W, or Y
AKLNISXI

SEQ ID NO: 575 - protein, 8 aa, Artificial Sequence
  Description of Artificial Sequence: Synthetic Peptide
  SITE (7)..(7): Xaa is C, D, M, R, v ,W, or Y
AKLNLSXI

SEQ ID NO: 576 - protein, 8 aa, Artificial Sequence
  Description of Artificial Sequence: Synthetic Peptide
  SITE (7)..(7): Xaa is C, F, H, M, R, or W
AKLNISXL

SEQ ID NO: 577 - protein, 8 aa, Artificial Sequence
  Description of Artificial Sequence: Synthetic Peptide
  SITE (7)..(7): Xaa is C, M, R, T ,V, or W
AKLNLSXL

SEQ ID NO: 578 - protein, 8 aa, Artificial Sequence
  Description of Artificial Sequence: Synthetic Peptide
  SITE (7)..(7): Xaa is A, C, E, F, G, H, I, L, M, N, Q, T, V, W, or Y
AKLQIDXI

SEQ ID NO: 579 - protein, 8 aa, Artificial Sequence
  Description of Artificial Sequence: Synthetic Peptide
  SITE (7)..(7): Xaa is C, F, I, M, N, P, Q, R, V, or W
AKLQLDXI

SEQ ID NO: 580 - protein, 8 aa, Artificial Sequence
  Description of Artificial Sequence: Synthetic Peptide
  SITE (7)..(7): Xaa is C, E, F, H, I, K, M, P, Q, V, W, or Y
AKLQIDXL

SEQ ID NO: 581 - protein, 8 aa, Artificial Sequence
  Description of Artificial Sequence: Synthetic Peptide
  SITE (7)..(7): Xaa is C, E, F, G, H, M, P, or S
AKLQLDXL

SEQ ID NO: 582 - protein, 8 aa, Artificial Sequence
  Description of Artificial Sequence: Synthetic Peptide
  SITE (7)..(7): Xaa is C, F, G, H, I, L, M, N, P, Q, S, T, V, W, or Y
AKLQIRXI

SEQ ID NO: 583 - protein, 8 aa, Artificial Sequence
  Description of Artificial Sequence: Synthetic Peptide
  SITE (7)..(7): Xaa is A, C, D, E, F, H, I, K, L, M, P, Q, R, S, V, W, or Y
AKLQLRXI

SEQ ID NO: 584 - protein, 8 aa, Artificial Sequence
  Description of Artificial Sequence: Synthetic Peptide
  SITE (7)..(7): Xaa is C, D, E, G, H, I, K, L, M, P, Q, R, W, or Y
AKLQIRXL

SEQ ID NO: 585 - protein, 8 aa, Artificial Sequence
  Description of Artificial Sequence: Synthetic Peptide
  SITE (7)..(7): Xaa is C, D, F, H, M, N, P, R, S, T, V, W, or Y
AKLQLRXL

SEQ ID NO: 586 - protein, 8 aa, Artificial Sequence
  Description of Artificial Sequence: Synthetic Peptide
  SITE (7)..(7): Xaa is C, E, I, L, M, N, R, S, T, V, or W
AKLQISXI

SEQ ID NO: 587 - protein, 8 aa, Artificial Sequence
  Description of Artificial Sequence: Synthetic Peptide
  SITE (7)..(7): Xaa is C, F, H, I, K, M, N, P, V, W, or Y
AKLQLSXI

SEQ ID NO: 588 - protein, 8 aa, Artificial Sequence
  Description of Artificial Sequence: Synthetic Peptide
  SITE (7)..(7): Xaa is C, D, F, G ,I, K, M, N, Q, S, T, W, or Y
AKLQISXL

SEQ ID NO: 589 - protein, 8 aa, Artificial Sequence
  Description of Artificial Sequence: Synthetic Peptide
  SITE (7)..(7): Xaa is C, S, H, V, W, or Y
AKLQLSXL

SEQ ID NO: 590 - protein, 8 aa, Artificial Sequence
  Description of Artificial Sequence: Synthetic Peptide
  SITE (7)..(7): Xaa is C, H, I, L, or W
AKLSIDXI

SEQ ID NO: 591 - protein, 8 aa, Artificial Sequence
  Description of Artificial Sequence: Synthetic Peptide
  SITE (7)..(7): Xaa is H, M, V, or W
AKLSLDXI

SEQ ID NO: 592 - protein, 8 aa, Artificial Sequence
  Description of Artificial Sequence: Synthetic Peptide
  SITE (7)..(7): Xaa is C, F, K, M, or W
AKLSIDXL

SEQ ID NO: 593 - protein, 8 aa, Artificial Sequence
  Description of Artificial Sequence: Synthetic Peptide
  SITE (7)..(7): Xaa is F, A, C, I, K, L, W, or Y
AKLSLDXL

SEQ ID NO: 594 - protein, 8 aa, Artificial Sequence
  Description of Artificial Sequence: Synthetic Peptide
  SITE (7)..(7): Xaa is A, C, F, K, M, N, P, Q, T, V, W, or Y
AKLSIRXI

SEQ ID NO: 595 - protein, 8 aa, Artificial Sequence
  Description of Artificial Sequence: Synthetic Peptide
  SITE (7)..(7): Xaa is A, C, E, F, H, I, L, N, S, T, W, or Y
AKLSLRXI

SEQ ID NO: 596 - protein, 8 aa, Artificial Sequence
  Description of Artificial Sequence: Synthetic Peptide
  SITE (7)..(7): Xaa is C, G, N, R, S, W, or Y
AKLSIRXL

SEQ ID NO: 597 - protein, 8 aa, Artificial Sequence
  Description of Artificial Sequence: Synthetic Peptide
  SITE (7)..(7): Xaa is C, F, W, or Y
AKLSLRXL

SEQ ID NO: 598 - protein, 8 aa, Artificial Sequence
  Description of Artificial Sequence: Synthetic Peptide
  SITE (7)..(7): Xaa is C, H, M, N, R, or W
AKLSLSXI

SEQ ID NO: 599 - protein, 8 aa, Artificial Sequence
  Description of Artificial Sequence: Synthetic Peptide
  SITE (7)..(7): Xaa is C, P, or W
AKLSISXL

SEQ ID NO: 600 - protein, 8 aa, Artificial Sequence
  Description of Artificial Sequence: Synthetic Peptide
  SITE (7)..(7): Xaa is C, H, Q, or W
AKLSLSXL

SEQ ID NO: 601 - protein, 8 aa, Artificial Sequence
  Description of Artificial Sequence: Synthetic Peptide
  SITE (7)..(7): Xaa is A, C, D, F, G, H, K, L, M, N, P, Q, R, S, or W
AKNDIDXI

SEQ ID NO: 602 - protein, 8 aa, Artificial Sequence
  Description of Artificial Sequence: Synthetic Peptide
  SITE (7)..(7): Xaa is C, D, F, G, M, N, P, S, or W
AKNDLDXI

SEQ ID NO: 603 - protein, 8 aa, Artificial Sequence
  Description of Artificial Sequence: Synthetic Peptide
  SITE (7)..(7): Xaa is C, E, H, N, P, Q, R, S, or W
AKNDIDXL

SEQ ID NO: 604 - protein, 8 aa, Artificial Sequence
  Description of Artificial Sequence: Synthetic Peptide
  SITE (7)..(7): Xaa is C, D, F ,H ,L, M, T, V, or Y
AKNDLDXL

SEQ ID NO: 605 - protein, 8 aa, Artificial Sequence
  Description of Artificial Sequence: Synthetic Peptide
  SITE (7)..(7): Xaa is A, C, D, F, G, H, M, N, P, R, T, V, W, or Y
AKNDIRXI

SEQ ID NO: 606 - protein, 8 aa, Artificial Sequence
  Description of Artificial Sequence: Synthetic Peptide
  SITE (7)..(7): Xaa is C, D, E, H, L, M, N, Q, S, V, W, or Y
AKNDLRXI

SEQ ID NO: 607 - protein, 8 aa, Artificial Sequence
  Description of Artificial Sequence: Synthetic Peptide
  SITE (7)..(7): Xaa is C, D, F, G, H, M, P, R, T, W, or Y
AKNDIRXL

SEQ ID NO: 608 - protein, 8 aa, Artificial Sequence
  Description of Artificial Sequence: Synthetic Peptide
  SITE (7)..(7): Xaa is C, F, H, L, M, N, P, Q, R, S, V, W, or Y
AKNDLRXL

SEQ ID NO: 609 - protein, 8 aa, Artificial Sequence
  Description of Artificial Sequence: Synthetic Peptide
  SITE (7)..(7): Xaa is A, C, D, F ,H, I, L, M, P, Q, R, S, W, or Y
AKNDISXI

SEQ ID NO: 610 - protein, 8 aa, Artificial Sequence
  Description of Artificial Sequence: Synthetic Peptide
  SITE (7)..(7): Xaa is C, D, G, H, L, M, P, Q, R, V, or W
AKNDLSXI

SEQ ID NO: 611 - protein, 8 aa, Artificial Sequence
  Description of Artificial Sequence: Synthetic Peptide
  SITE (7)..(7): Xaa is C, F, H, I, M, P, Q, S, V, W, or Y
AKNDISXL

SEQ ID NO: 612 - protein, 8 aa, Artificial Sequence
  Description of Artificial Sequence: Synthetic Peptide
  SITE (7)..(7): Xaa is C, G, H, M, N, Q, V, W, or Y
AKNDLSXL

SEQ ID NO: 613 - protein, 8 aa, Artificial Sequence
  Description of Artificial Sequence: Synthetic Peptide
  SITE (7)..(7): Xaa is A, C, E, G, I, M, P, Q, P, or Y
AKNEIDXI

SEQ ID NO: 614 - protein, 8 aa, Artificial Sequence
  Description of Artificial Sequence: Synthetic Peptide
  SITE (7)..(7): Xaa is A, C, F, G, H, I, L, M, P, S, V, W, or Y
AKNELDXI

SEQ ID NO: 615 - protein, 8 aa, Artificial Sequence
  Description of Artificial Sequence: Synthetic Peptide
  SITE (7)..(7): Xaa is A, C, K, P, Q, T, or W
AKNEIDXL

SEQ ID NO: 616 - protein, 8 aa, Artificial Sequence
  Description of Artificial Sequence: Synthetic Peptide
  SITE (7)..(7): Xaa is A, G, H, N, or W
AKNELDXL

SEQ ID NO: 617 - protein, 8 aa, Artificial Sequence
  Description of Artificial Sequence: Synthetic Peptide
  SITE (7)..(7): Xaa is C, E, I, L, N, P, T, V, or W
AKNELRXI

SEQ ID NO: 618 - protein, 8 aa, Artificial Sequence
  Description of Artificial Sequence: Synthetic Peptide
  SITE (7)..(7): Xaa is C, F, H, K, L, M, N, Q, R, V, or W
AKNEIRXL

SEQ ID NO: 619 - protein, 8 aa, Artificial Sequence
  Description of Artificial Sequence: Synthetic Peptide
  SITE (7)..(7): Xaa is C, D, G, H ,I, K, P, Q, V, or Y
AKNELRXL

SEQ ID NO: 620 - protein, 8 aa, Artificial Sequence
  Description of Artificial Sequence: Synthetic Peptide
  SITE (7)..(7): Xaa is C, D, E, F, H, I, M, P, R, W, or Y
AKNEISXI

SEQ ID NO: 621 - protein, 8 aa, Artificial Sequence
  Description of Artificial Sequence: Synthetic Peptide
  SITE (7)..(7): Xaa is A, C, F, H, P, V, or W
AKNELSXI

SEQ ID NO: 622 - protein, 8 aa, Artificial Sequence
  Description of Artificial Sequence: Synthetic Peptide
  SITE (7)..(7): Xaa is C, D, F, K, M, N, P, T, or W
AKNEISXL

SEQ ID NO: 623 - protein, 8 aa, Artificial Sequence
  Description of Artificial Sequence: Synthetic Peptide
  SITE (7)..(7): Xaa is C, H, S, or W
AKNELSXL

SEQ ID NO: 624 - protein, 8 aa, Artificial Sequence
  Description of Artificial Sequence: Synthetic Peptide
  SITE (7)..(7): Xaa is A, C, E, F, H, I, M, P, S, or W
AKNNIDXI

SEQ ID NO: 625 - protein, 8 aa, Artificial Sequence
  Description of Artificial Sequence: Synthetic Peptide
  SITE (7)..(7): Xaa is C, E, F, G, H, M, P, Q, R, S, W, or Y
AKNNLDXI

SEQ ID NO: 626 - protein, 8 aa, Artificial Sequence
  Description of Artificial Sequence: Synthetic Peptide
  SITE (7)..(7): Xaa is E, H,  M, Q, S, or W
AKNNIDXL

SEQ ID NO: 627 - protein, 8 aa, Artificial Sequence
  Description of Artificial Sequence: Synthetic Peptide
  SITE (7)..(7): Xaa is C, D, E, F, I, L, M, P, W, and Y
AKNNLDXL

SEQ ID NO: 628 - protein, 8 aa, Artificial Sequence
  Description of Artificial Sequence: Synthetic Peptide
  SITE (7)..(7): Xaa is C, D, E, G, K, M, N, Q, R, S, T, W, or Y
AKNNIRXI

SEQ ID NO: 629 - protein, 8 aa, Artificial Sequence
  Description of Artificial Sequence: Synthetic Peptide
  SITE (7)..(7): Xaa is C, D, E, F, G, I, L, M, Q, R, T, or W
AKNNLRXI

SEQ ID NO: 630 - protein, 8 aa, Artificial Sequence
  Description of Artificial Sequence: Synthetic Peptide
  SITE (7)..(7): Xaa is C, D, E, F, G, H, N, P, Q, T, W, or Y
AKNNIRXL

SEQ ID NO: 631 - protein, 8 aa, Artificial Sequence
  Description of Artificial Sequence: Synthetic Peptide
  SITE (7)..(7): Xaa is C, E, F, H, M, T, W, or Y
AKNNLRXL

SEQ ID NO: 632 - protein, 8 aa, Artificial Sequence
  Description of Artificial Sequence: Synthetic Peptide
  SITE (7)..(7): Xaa is C, D, F, H, M, R, V, W, or Y
AKNNISXI

SEQ ID NO: 633 - protein, 8 aa, Artificial Sequence
  Description of Artificial Sequence: Synthetic Peptide
  SITE (7)..(7): Xaa is A, C, E, F, I, M, N, P, Q, S, or W
AKNNLSXI

SEQ ID NO: 634 - protein, 8 aa, Artificial Sequence
  Description of Artificial Sequence: Synthetic Peptide
  SITE (7)..(7): Xaa is C, E, G, H, K, M, N, P, R, W, or Y
AKNNISXL

SEQ ID NO: 635 - protein, 8 aa, Artificial Sequence
  Description of Artificial Sequence: Synthetic Peptide
  SITE (7)..(7): Xaa is C, F, H, P, T, V, W, or Y
AKNNLSXL

SEQ ID NO: 636 - protein, 8 aa, Artificial Sequence
  Description of Artificial Sequence: Synthetic Peptide
  SITE (7)..(7): Xaa is A, C, D, E, F, G, H, I, K, L, M, N, P, Q, R, S, T, V, or W
AKNQIDXI

SEQ ID NO: 637 - protein, 8 aa, Artificial Sequence
  Description of Artificial Sequence: Synthetic Peptide
  SITE (7)..(7): Xaa is A, C, E, F, G, H, I, K, M, N, P, T, W, or Y
AKNQLDXI

SEQ ID NO: 638 - protein, 8 aa, Artificial Sequence
  Description of Artificial Sequence: Synthetic Peptide
  SITE (7)..(7): Xaa is C, F, G, H, K, M, N, R, T, or W
AKNQIDXL

SEQ ID NO: 639 - protein, 8 aa, Artificial Sequence
  Description of Artificial Sequence: Synthetic Peptide
  SITE (7)..(7): Xaa is C, E, F, M, R, or T
AKNQLDXL

SEQ ID NO: 640 - protein, 8 aa, Artificial Sequence
  Description of Artificial Sequence: Synthetic Peptide
  SITE (7)..(7): Xaa is C, D, E, I, L, M, N, P, Q, R, T, v, W, or Y
AKNQIRXI

SEQ ID NO: 641 - protein, 8 aa, Artificial Sequence
  Description of Artificial Sequence: Synthetic Peptide
  SITE (7)..(7): Xaa is C, F, G, H, I, K, L, M, N, P, Q, R, S, T, W, or Y
AKNQLRXI

SEQ ID NO: 642 - protein, 8 aa, Artificial Sequence
  Description of Artificial Sequence: Synthetic Peptide
  SITE (7)..(7): Xaa is A, C, D, E, G, H, I, K, M, P, Q, S, T, W, or Y
AKNQIRXL

SEQ ID NO: 643 - protein, 8 aa, Artificial Sequence
  Description of Artificial Sequence: Synthetic Peptide
  SITE (7)..(7): Xaa is C, E, F, G, H, I, K, M, P, Q, T, V, W, or Y
AKNQLRXL

SEQ ID NO: 644 - protein, 8 aa, Artificial Sequence
  Description of Artificial Sequence: Synthetic Peptide
  SITE (7)..(7): Xaa is A, D, F, G, H, I, N, P, Q, R, V, W, or Y
AKNQISXI

SEQ ID NO: 645 - protein, 8 aa, Artificial Sequence
  Description of Artificial Sequence: Synthetic Peptide
  SITE (7)..(7): Xaa is C, D, E, F, H, I, M, P, Q, R, T, or W
AKNQLSXI

SEQ ID NO: 646 - protein, 8 aa, Artificial Sequence
  Description of Artificial Sequence: Synthetic Peptide
  SITE (7)..(7): Xaa is C, F, H, K, L, M, Q, W, or Y
AKNQISXL

SEQ ID NO: 647 - protein, 8 aa, Artificial Sequence
  Description of Artificial Sequence: Synthetic Peptide
  SITE (7)..(7): Xaa is F, G, I, M, T, or W
AKNQLSXL

SEQ ID NO: 648 - protein, 8 aa, Artificial Sequence
  Description of Artificial Sequence: Synthetic Peptide
  SITE (7)..(7): Xaa is A, C, G, H, M, P, or W
AKNSIDXI

SEQ ID NO: 649 - protein, 8 aa, Artificial Sequence
  Description of Artificial Sequence: Synthetic Peptide
  SITE (7)..(7): Xaa is A, C, F, H, M, V, or W
AKNSLDXI

SEQ ID NO: 650 - protein, 8 aa, Artificial Sequence
  Description of Artificial Sequence: Synthetic Peptide
  SITE (7)..(7): Xaa is C, G, H, I, M, P, Q, R, or W
AKNSIDXL

SEQ ID NO: 651 - protein, 8 aa, Artificial Sequence
  Description of Artificial Sequence: Synthetic Peptide
  SITE (7)..(7): Xaa is C, H, N, T, V, or Y
AKNSLDXL

SEQ ID NO: 652 - protein, 8 aa, Artificial Sequence
  Description of Artificial Sequence: Synthetic Peptide
  SITE (7)..(7): Xaa is C, F, G, H, I, K, L, M, N, P, V, W, or Y
AKNSIRXI

SEQ ID NO: 653 - protein, 8 aa, Artificial Sequence
  Description of Artificial Sequence: Synthetic Peptide
  SITE (7)..(7): Xaa is A, C, D, I, K, L, M, N, P, Q, S, T, V, or W
AKNSLRXI

SEQ ID NO: 654 - protein, 8 aa, Artificial Sequence
  Description of Artificial Sequence: Synthetic Peptide
  SITE (7)..(7): Xaa is E, F, G, H, I, L, M, P, Q, T, W, or Y
AKNSIRXL

SEQ ID NO: 655 - protein, 8 aa, Artificial Sequence
  Description of Artificial Sequence: Synthetic Peptide
  SITE (7)..(7): Xaa is A, C, F, G, P, T, or W
AKNSLRXL

SEQ ID NO: 656 - protein, 8 aa, Artificial Sequence
  Description of Artificial Sequence: Synthetic Peptide
  SITE (7)..(7): Xaa is C,E, F, H, L, M, N, Q, W, or Y
AKNSLSXI

SEQ ID NO: 657 - protein, 8 aa, Artificial Sequence
  Description of Artificial Sequence: Synthetic Peptide
  SITE (7)..(7): Xaa is G, K, L, M, P, R, S, or W
AKNSISXL

SEQ ID NO: 658 - protein, 8 aa, Artificial Sequence
  Description of Artificial Sequence: Synthetic Peptide
  SITE (7)..(7): Xaa is C, D, F, G, N, or Q
AKNSLSXL

SEQ ID NO: 659 - protein, 8 aa, Artificial Sequence
  Description of Artificial Sequence: Synthetic Peptide
  SITE (7)..(7): Xaa is D, K, M, N, P, Q, R, or T
AKSDIDXI

SEQ ID NO: 660 - protein, 8 aa, Artificial Sequence
  Description of Artificial Sequence: Synthetic Peptide
  SITE (7)..(7): Xaa is A, C, D, H, M, T, V, W, or Y
AKSDLDXI

SEQ ID NO: 661 - protein, 8 aa, Artificial Sequence
  Description of Artificial Sequence: Synthetic Peptide
  SITE (7)..(7): Xaa is E, I, K, M, T, or Y
AKSDIDXL

SEQ ID NO: 662 - protein, 8 aa, Artificial Sequence
  Description of Artificial Sequence: Synthetic Peptide
  SITE (7)..(7): Xaa is C, D, H, M, P, or S
AKSDLDXL

SEQ ID NO: 663 - protein, 8 aa, Artificial Sequence
  Description of Artificial Sequence: Synthetic Peptide
  SITE (7)..(7): Xaa is A, C, D, H, K, M, P, R, T, V, W, or Y
AKSDIRXI

SEQ ID NO: 664 - protein, 8 aa, Artificial Sequence
  Description of Artificial Sequence: Synthetic Peptide
  SITE (7)..(7): Xaa is C, G, I, L, N, P, Q, S, T, V, or Y
AKSDLRXI

SEQ ID NO: 665 - protein, 8 aa, Artificial Sequence
  Description of Artificial Sequence: Synthetic Peptide
  SITE (7)..(7): Xaa is A, F, G, H, I, L, M, N, R, S, T, V, or W
AKSDIRXL

SEQ ID NO: 666 - protein, 8 aa, Artificial Sequence
  Description of Artificial Sequence: Synthetic Peptide
  SITE (7)..(7): Xaa is A, C, E, F, G, H, M, N, P, Q, T, W, or Y
AKSDLRXL

SEQ ID NO: 667 - protein, 8 aa, Artificial Sequence
  Description of Artificial Sequence: Synthetic Peptide
  SITE (7)..(7): Xaa is A, C, D, E, F, G, H,I, K, L, M, P, Q, or R
AKSDISXI

SEQ ID NO: 668 - protein, 8 aa, Artificial Sequence
  Description of Artificial Sequence: Synthetic Peptide
  SITE (7)..(7): Xaa is A, C, D, E, F, G, I, M, or W
AKSDLSXI

SEQ ID NO: 669 - protein, 8 aa, Artificial Sequence
  Description of Artificial Sequence: Synthetic Peptide
  SITE (7)..(7): Xaa is C, G, I, P, W, or Y
AKSDISXL

SEQ ID NO: 670 - protein, 8 aa, Artificial Sequence
  Description of Artificial Sequence: Synthetic Peptide
  SITE (7)..(7): Xaa is C, I, M, or Y
AKSDLSXL

SEQ ID NO: 671 - protein, 8 aa, Artificial Sequence
  Description of Artificial Sequence: Synthetic Peptide
  SITE (7)..(7): Xaa is C, I, M, N, P, Q, T, V, W, or Y
AKSEIDXI

SEQ ID NO: 672 - protein, 8 aa, Artificial Sequence
  Description of Artificial Sequence: Synthetic Peptide
  SITE (7)..(7): Xaa is C, D, G, H, I, M, N, P, R, V, W, or Y
AKSELDXI

SEQ ID NO: 673 - protein, 8 aa, Artificial Sequence
  Description of Artificial Sequence: Synthetic Peptide
  SITE (7)..(7): Xaa is C, F, or L
AKSEIDXL

SEQ ID NO: 674 - protein, 8 aa, Artificial Sequence
  Description of Artificial Sequence: Synthetic Peptide
  SITE (7)..(7): Xaa is H, L, P, or Y
AKSELDXL

SEQ ID NO: 675 - protein, 8 aa, Artificial Sequence
  Description of Artificial Sequence: Synthetic Peptide
  SITE (7)..(7): Xaa is C, F, G, I, K, Q, R, S, or Y
AKSEIRXI

SEQ ID NO: 676 - protein, 8 aa, Artificial Sequence
  Description of Artificial Sequence: Synthetic Peptide
  SITE (7)..(7): Xaa is C, F, G, H, K, L, M, P, V, W, or Y
AKSELRXI

SEQ ID NO: 677 - protein, 8 aa, Artificial Sequence
  Description of Artificial Sequence: Synthetic Peptide
  SITE (7)..(7): Xaa is C, D, H, I, K, M, P, Q, T, V, W, or Y
AKSEIRXL

SEQ ID NO: 678 - protein, 8 aa, Artificial Sequence
  Description of Artificial Sequence: Synthetic Peptide
  SITE (7)..(7): Xaa is C, D, F, H, L, M, P, S, or V
AKSELRXL

SEQ ID NO: 679 - protein, 8 aa, Artificial Sequence
  Description of Artificial Sequence: Synthetic Peptide
  SITE (7)..(7): Xaa is A, C, G, H, I, K, L, M, N, P, R, S, V, or Y
AKSEISXI

SEQ ID NO: 680 - protein, 8 aa, Artificial Sequence
  Description of Artificial Sequence: Synthetic Peptide
  SITE (7)..(7): Xaa is C, F, H, I, L,, M, V, or W
AKSELSXI

SEQ ID NO: 681 - protein, 8 aa, Artificial Sequence
  Description of Artificial Sequence: Synthetic Peptide
  SITE (7)..(7): Xaa is D, H, M, W, or Y
AKSEISXL

SEQ ID NO: 682 - protein, 8 aa, Artificial Sequence
  Description of Artificial Sequence: Synthetic Peptide
  SITE (7)..(7): Xaa is C, F, or W
AKSELSXL

SEQ ID NO: 683 - protein, 8 aa, Artificial Sequence
  Description of Artificial Sequence: Synthetic Peptide
  SITE (7)..(7): Xaa is C, F, G, H, L, M, N, P, V, W, or Y
AKSNIDXI

SEQ ID NO: 684 - protein, 8 aa, Artificial Sequence
  Description of Artificial Sequence: Synthetic Peptide
  SITE (7)..(7): Xaa is C, E, F, H, I, M, N, P, Q, S, T, V, W, or Y
AKSNLDXI

SEQ ID NO: 685 - protein, 8 aa, Artificial Sequence
  Description of Artificial Sequence: Synthetic Peptide
  SITE (7)..(7): Xaa is C, D, F, K, L, M, N, Q, V, or Y
AKSNIDXL

SEQ ID NO: 686 - protein, 8 aa, Artificial Sequence
  Description of Artificial Sequence: Synthetic Peptide
  SITE (7)..(7): Xaa is D, F, I, M, P, or Q
AKSNLDXL

SEQ ID NO: 687 - protein, 8 aa, Artificial Sequence
  Description of Artificial Sequence: Synthetic Peptide
  SITE (7)..(7): Xaa is D, E, F, G, H, L, M, P, Q, R, S, W, or Y
AKSNIRXI

SEQ ID NO: 688 - protein, 8 aa, Artificial Sequence
  Description of Artificial Sequence: Synthetic Peptide
  SITE (7)..(7): Xaa is A, C, D, F, G, I, M, P, Q, R, S, T, V, W, or Y
AKSNLRXI

SEQ ID NO: 689 - protein, 8 aa, Artificial Sequence
  Description of Artificial Sequence: Synthetic Peptide
  SITE (7)..(7): Xaa is D, E, F, G, H, L, M, P, Q, R, S, W, or Y
AKSNIRXI

SEQ ID NO: 690 - protein, 8 aa, Artificial Sequence
  Description of Artificial Sequence: Synthetic Peptide
  SITE (7)..(7): Xaa is A, C, D, F, G, I, M, P, Q, R, S, T, V, W, or Y
AKSNLRXI

SEQ ID NO: 691 - protein, 8 aa, Artificial Sequence
  Description of Artificial Sequence: Synthetic Peptide
  SITE (7)..(7): Xaa is C, D, E, G, H, I, M, N, P, R, T, V, W, or Y
AKSNIRXL

SEQ ID NO: 692 - protein, 8 aa, Artificial Sequence
  Description of Artificial Sequence: Synthetic Peptide
  SITE (7)..(7): Xaa is C, D, E ,F, G, H, M, R, S, T, or Y
AKSNLRXL

SEQ ID NO: 693 - protein, 8 aa, Artificial Sequence
  Description of Artificial Sequence: Synthetic Peptide
  SITE (7)..(7): Xaa is C, D, E, G, H, I, M, N, P, R, T, V, W, or Y
AKSNIRXL

SEQ ID NO: 694 - protein, 8 aa, Artificial Sequence
  Description of Artificial Sequence: Synthetic Peptide
  SITE (7)..(7): Xaa is A, C, E, F, G, I, K, M, N, P, Q, R, T, V, W, or Y
AKSNISXI

SEQ ID NO: 695 - protein, 8 aa, Artificial Sequence
  Description of Artificial Sequence: Synthetic Peptide
  SITE (7)..(7): Xaa is A, C, D, H, M, P, or Y
AKSNLSXI

SEQ ID NO: 696 - protein, 8 aa, Artificial Sequence
  Description of Artificial Sequence: Synthetic Peptide
  SITE (7)..(7): Xaa is C, F, G, H, K, L, M, P, Q, W, or Y
AKSNISXL

SEQ ID NO: 697 - protein, 8 aa, Artificial Sequence
  Description of Artificial Sequence: Synthetic Peptide
  SITE (7)..(7): Xaa is C, I, L, M, W, or Y
AKSNLSXL

SEQ ID NO: 698 - protein, 8 aa, Artificial Sequence
  Description of Artificial Sequence: Synthetic Peptide
  SITE (7)..(7): Xaa is C, H, I, K, M, P, R, V, or W
AKSQIDXI

SEQ ID NO: 699 - protein, 8 aa, Artificial Sequence
  Description of Artificial Sequence: Synthetic Peptide
  SITE (7)..(7): Xaa is A, C, D, H, I, K, M, N, Q, S, or W
AKSQLDXI

SEQ ID NO: 700 - protein, 8 aa, Artificial Sequence
  Description of Artificial Sequence: Synthetic Peptide
  SITE (7)..(7): Xaa is C, D, G, L, M, P, or T
AKSQIDXL

SEQ ID NO: 701 - protein, 8 aa, Artificial Sequence
  Description of Artificial Sequence: Synthetic Peptide
  SITE (7)..(7): Xaa is F, H, N, R, or W
AKSQLDXL

SEQ ID NO: 702 - protein, 8 aa, Artificial Sequence
  Description of Artificial Sequence: Synthetic Peptide
  SITE (7)..(7): Xaa is C, F, G, H, I, K, M, P, R, S, T, V, or Y
AKSQIRXI

SEQ ID NO: 703 - protein, 8 aa, Artificial Sequence
  Description of Artificial Sequence: Synthetic Peptide
  SITE (7)..(7): Xaa is C, E, F, H, I, L, M, P, Q, R, V, or Y
AKSQLRXI

SEQ ID NO: 704 - protein, 8 aa, Artificial Sequence
  Description of Artificial Sequence: Synthetic Peptide
  SITE (7)..(7): Xaa is A, C, D, E, F, G, K, L, M, P, Q, S, T, V, W, or Y
AKSQIRXL

SEQ ID NO: 705 - protein, 8 aa, Artificial Sequence
  Description of Artificial Sequence: Synthetic Peptide
  SITE (7)..(7): Xaa is C, D, F, G, H, I, M, N, P, T, V, W, or Y
AKSQLRXL

SEQ ID NO: 706 - protein, 8 aa, Artificial Sequence
  Description of Artificial Sequence: Synthetic Peptide
  SITE (7)..(7): Xaa is C, D, F, G, H, K, M, N, P, R, S, V, or Y
AKSQISXI

SEQ ID NO: 707 - protein, 8 aa, Artificial Sequence
  Description of Artificial Sequence: Synthetic Peptide
  SITE (7)..(7): Xaa is C, G, H, M, N, P, T, or W
AKSQLSXI

SEQ ID NO: 708 - protein, 8 aa, Artificial Sequence
  Description of Artificial Sequence: Synthetic Peptide
  SITE (7)..(7): Xaa is C, F, G, M, N, T, W, or Y
AKSQISXL

SEQ ID NO: 709 - protein, 8 aa, Artificial Sequence
  Description of Artificial Sequence: Synthetic Peptide
  SITE (7)..(7): Xaa is C, F, M, W, or Y
AKSQLSXL

SEQ ID NO: 710 - protein, 8 aa, Artificial Sequence
  Description of Artificial Sequence: Synthetic Peptide
  SITE (7)..(7): Xaa is C, G, H, K, L, M, N, P, W, or Y
AKSSIDXI

SEQ ID NO: 711 - protein, 8 aa, Artificial Sequence
  Description of Artificial Sequence: Synthetic Peptide
  SITE (7)..(7): Xaa is A, L, M, Q, V, or W
AKSSLDXI

SEQ ID NO: 712 - protein, 8 aa, Artificial Sequence
  Description of Artificial Sequence: Synthetic Peptide
  SITE (7)..(7): Xaa is I, P, Q, R, V, or W
AKSSIDXL

SEQ ID NO: 713 - protein, 8 aa, Artificial Sequence
  Description of Artificial Sequence: Synthetic Peptide
  SITE (7)..(7): Xaa is C, H, M, P, or V
AKSSLDXL

SEQ ID NO: 714 - protein, 8 aa, Artificial Sequence
  Description of Artificial Sequence: Synthetic Peptide
  SITE (7)..(7): Xaa is A, C, F, H, I, N, P, Q, R, T, V, or W
AKSSIRXI

SEQ ID NO: 715 - protein, 8 aa, Artificial Sequence
  Description of Artificial Sequence: Synthetic Peptide
  SITE (7)..(7): Xaa is C, F, G, H, I, M, N, P, Q, R, V, W, or Y
AKSSLRXI

SEQ ID NO: 716 - protein, 8 aa, Artificial Sequence
  Description of Artificial Sequence: Synthetic Peptide
  SITE (7)..(7): Xaa is C, E, F, G, I, M, P, Q, S, V, W, or Y
AKSSIRXL

SEQ ID NO: 717 - protein, 8 aa, Artificial Sequence
  Description of Artificial Sequence: Synthetic Peptide
  SITE (7)..(7): Xaa is D, F, G, N, P, or Y
AKSSLRXL

SEQ ID NO: 718 - protein, 8 aa, Artificial Sequence
  Description of Artificial Sequence: Synthetic Peptide
  SITE (7)..(7): Xaa is C, H, I, L, M, P, Q, T, or Y
AKSSISXI

SEQ ID NO: 719 - protein, 8 aa, Artificial Sequence
  Description of Artificial Sequence: Synthetic Peptide
  SITE (7)..(7): Xaa is E, H, M, P, R, S, V, or Y
AKSSLSXI

SEQ ID NO: 720 - protein, 8 aa, Artificial Sequence
  Description of Artificial Sequence: Synthetic Peptide
  SITE (7)..(7): Xaa is C, F, H, I, M, Q, or Y
AKSSISXL

SEQ ID NO: 721 - protein, 8 aa, Artificial Sequence
  Description of Artificial Sequence: Synthetic Peptide
  SITE (7)..(7): Xaa is F, M, P, W, or Y
AKSSLSXL

SEQ ID NO: 722 - protein, 8 aa, Artificial Sequence
  Description of Artificial Sequence: Synthetic Peptide
  SITE (7)..(7): Xaa is C, D, E, F, H, I, L, P, Q, S, V, W, or Y
FGADIDXI

SEQ ID NO: 723 - protein, 8 aa, Artificial Sequence
  Description of Artificial Sequence: Synthetic Peptide
  SITE (7)..(7): Xaa is C, D, F, G, H, K, L, M, N, P, S, T, W, Y
FGADLDXI

SEQ ID NO: 724 - protein, 8 aa, Artificial Sequence
  Description of Artificial Sequence: Synthetic Peptide
  SITE (7)..(7): Xaa is F, I, M, N, Q, V, or W
FGADIDXL

SEQ ID NO: 725 - protein, 8 aa, Artificial Sequence
  Description of Artificial Sequence: Synthetic Peptide
  SITE (7)..(7): Xaa is C, E, H, K, M, Q, E, or Y
FGADLDXL

SEQ ID NO: 726 - protein, 8 aa, Artificial Sequence
  Description of Artificial Sequence: Synthetic Peptide
  SITE (7)..(7): Xaa is C, D, E, F, G, H, L, N, Q, S, W, or Y
FGADIRXI

SEQ ID NO: 727 - protein, 8 aa, Artificial Sequence
  Description of Artificial Sequence: Synthetic Peptide
  SITE (7)..(7): Xaa is F, H, I, K, M, P, Q, T, V, W, or Y
FGADLRXI

SEQ ID NO: 728 - protein, 8 aa, Artificial Sequence
  Description of Artificial Sequence: Synthetic Peptide
  SITE (7)..(7): Xaa is C, E, L, N, P, Q, R, S, W, or Y
FGADIRXL

SEQ ID NO: 729 - protein, 8 aa, Artificial Sequence
  Description of Artificial Sequence: Synthetic Peptide
  SITE (7)..(7): Xaa is C, I, K, N, or P
FGADLRXL

SEQ ID NO: 730 - protein, 8 aa, Artificial Sequence
  Description of Artificial Sequence: Synthetic Peptide
  SITE (7)..(7): Xaa is C, E, M, P, Q, or R
FGADISXI

SEQ ID NO: 731 - protein, 8 aa, Artificial Sequence
  Description of Artificial Sequence: Synthetic Peptide
  SITE (7)..(7): Xaa is A, C, E, Q, R. V. or W
FGADLSXI

SEQ ID NO: 732 - protein, 8 aa, Artificial Sequence
  Description of Artificial Sequence: Synthetic Peptide
  SITE (7)..(7): Xaa is C, D, F, H, M, P, Q, W, or Y
FGADISXL

SEQ ID NO: 733 - protein, 8 aa, Artificial Sequence
  Description of Artificial Sequence: Synthetic Peptide
  SITE (7)..(7): Xaa is C, F, K, L, M, S, T, or W
FGADLSXL

SEQ ID NO: 734 - protein, 8 aa, Artificial Sequence
  Description of Artificial Sequence: Synthetic Peptide
  SITE (7)..(7): Xaa is C, H, L, , W, or Y
FGAELDXI

SEQ ID NO: 735 - protein, 8 aa, Artificial Sequence
  Description of Artificial Sequence: Synthetic Peptide
  SITE (7)..(7): Xaa is E, H, K, L. M. P, Q, W, or Y
FGAEIDXL

SEQ ID NO: 736 - protein, 8 aa, Artificial Sequence
  Description of Artificial Sequence: Synthetic Peptide
  SITE (7)..(7): Xaa is H, K, L, M, P, Q, W, or Y
FGAEIDXL

SEQ ID NO: 737 - protein, 8 aa, Artificial Sequence
  Description of Artificial Sequence: Synthetic Peptide
  SITE (7)..(7): Xaa is C, D, F, H, M ,N ,or Y
FGAELDXL

SEQ ID NO: 738 - protein, 8 aa, Artificial Sequence
  Description of Artificial Sequence: Synthetic Peptide
  SITE (7)..(7): Xaa is C, D, E, F, H, K, M, N, P, Q, R, T, W, or Y
FGAEIRXI

SEQ ID NO: 739 - protein, 8 aa, Artificial Sequence
  Description of Artificial Sequence: Synthetic Peptide
  SITE (7)..(7): Xaa is C, D, E, H, I, K, L, M, N, P, Q, S, T, or W
FGAELRXI

SEQ ID NO: 740 - protein, 8 aa, Artificial Sequence
  Description of Artificial Sequence: Synthetic Peptide
  SITE (7)..(7): Xaa is C, H, K, M, P, S, T, V, W, or Y
FGAEIRXL

SEQ ID NO: 741 - protein, 8 aa, Artificial Sequence
  Description of Artificial Sequence: Synthetic Peptide
  SITE (7)..(7): Xaa is C, W, or Y
FGAELRXL

SEQ ID NO: 742 - protein, 8 aa, Artificial Sequence
  Description of Artificial Sequence: Synthetic Peptide
  SITE (7)..(7): Xaa is C, I, N, P, R, or Y
FGAEISXI

SEQ ID NO: 743 - protein, 8 aa, Artificial Sequence
  Description of Artificial Sequence: Synthetic Peptide
  SITE (7)..(7): Xaa is C, F, I, M, N, or W
FGAELSXI

SEQ ID NO: 744 - protein, 8 aa, Artificial Sequence
  Description of Artificial Sequence: Synthetic Peptide
  SITE (7)..(7): Xaa is C, D, H, M, P, R, V, or Y
FGAEISXL

SEQ ID NO: 745 - protein, 8 aa, Artificial Sequence
  Description of Artificial Sequence: Synthetic Peptide
  SITE (7)..(7): Xaa is D, F, I, M, N, Q, V, W, or Y
FGAELSXL

SEQ ID NO: 746 - protein, 8 aa, Artificial Sequence
  Description of Artificial Sequence: Synthetic Peptide
  SITE (7)..(7): Xaa is C, E, F, H, I, K, L, M, P, Q, S, T, V, W, or Y
FGANIDXI

SEQ ID NO: 747 - protein, 8 aa, Artificial Sequence
  Description of Artificial Sequence: Synthetic Peptide
  SITE (7)..(7): Xaa is A, C, F, G, H, N, P, Q, R, S, T, V, W, or Y
FGANLDXI

SEQ ID NO: 748 - protein, 8 aa, Artificial Sequence
  Description of Artificial Sequence: Synthetic Peptide
  SITE (7)..(7): Xaa is A, C, D, E, F, G, I, K, M, N, Q, S, T, or W
FGANIDXL

SEQ ID NO: 749 - protein, 8 aa, Artificial Sequence
  Description of Artificial Sequence: Synthetic Peptide
  SITE (7)..(7): Xaa is C, D, F, G, H, K, N, M, P, R, W, or Y
FGANLDXL

SEQ ID NO: 750 - protein, 8 aa, Artificial Sequence
  Description of Artificial Sequence: Synthetic Peptide
  SITE (7)..(7): Xaa is C, D, E, F, G ,H, K, M, P, Q, R, S, T, W, or Y
FGANIRXI

SEQ ID NO: 751 - protein, 8 aa, Artificial Sequence
  Description of Artificial Sequence: Synthetic Peptide
  SITE (7)..(7): Xaa is C, D, F, G, I, M, W, or Y
FGANLRXI

SEQ ID NO: 752 - protein, 8 aa, Artificial Sequence
  Description of Artificial Sequence: Synthetic Peptide
  SITE (7)..(7): Xaa is C, D, E, F, G, H, I, K, M, N, P, Q, R, S, T, V, W, or Y
FGANIRXL

SEQ ID NO: 753 - protein, 8 aa, Artificial Sequence
  Description of Artificial Sequence: Synthetic Peptide
  SITE (7)..(7): Xaa is C, F, G, M, P, W, or Y
FGANLRXL

SEQ ID NO: 754 - protein, 8 aa, Artificial Sequence
  Description of Artificial Sequence: Synthetic Peptide
  SITE (7)..(7): Xaa is A, C, D, E, G, H, K, L, M, P, R, W, or Y
FGANISXI

SEQ ID NO: 755 - protein, 8 aa, Artificial Sequence
  Description of Artificial Sequence: Synthetic Peptide
  SITE (7)..(7): Xaa is C, H, K, M, Q, R, S, T, or W
FGANLSXI

SEQ ID NO: 756 - protein, 8 aa, Artificial Sequence
  Description of Artificial Sequence: Synthetic Peptide
  SITE (7)..(7): Xaa is C, E, F, G, H, I, L, M, Q, S, V, or W
FGANISXL

SEQ ID NO: 757 - protein, 8 aa, Artificial Sequence
  Description of Artificial Sequence: Synthetic Peptide
  SITE (7)..(7): Xaa is C, E, F, I, K, L. M. Q. or W
FGANLSXL

SEQ ID NO: 758 - protein, 8 aa, Artificial Sequence
  Description of Artificial Sequence: Synthetic Peptide
  SITE (7)..(7): Xaa is C, D, E, F, I, K, L, M, N, P, Q, R, S, T, W, or Y
FGAQIDXI

SEQ ID NO: 759 - protein, 8 aa, Artificial Sequence
  Description of Artificial Sequence: Synthetic Peptide
  SITE (7)..(7): Xaa is C, E, F, H, I, K, L, M, N, P, Q, R, S, T, V, W, or Y
FGAQLDXI

SEQ ID NO: 760 - protein, 8 aa, Artificial Sequence
  Description of Artificial Sequence: Synthetic Peptide
  SITE (7)..(7): Xaa is C, D, F, G, L, M, N, R, S, V, W
FGAQIDXL

SEQ ID NO: 761 - protein, 8 aa, Artificial Sequence
  Description of Artificial Sequence: Synthetic Peptide
  SITE (7)..(7): Xaa is A, D, F, I, N, P, T, V, W, or Y
FGAQLDXL

SEQ ID NO: 762 - protein, 8 aa, Artificial Sequence
  Description of Artificial Sequence: Synthetic Peptide
  SITE (7)..(7): Xaa is C, D, E, F, G, H, K, L, M, N, P, Q, R, S, T, V, W, or Y
FGAQIRXI

SEQ ID NO: 763 - protein, 8 aa, Artificial Sequence
  Description of Artificial Sequence: Synthetic Peptide
  SITE (7)..(7): Xaa is C, D, E, F, G, H, I, K, M, N, P, Q, S, T, V, W, or Y
FGAQLRXI

SEQ ID NO: 764 - protein, 8 aa, Artificial Sequence
  Description of Artificial Sequence: Synthetic Peptide
  SITE (7)..(7): Xaa is A, C, F, G, H, K, M, N, P, Q, R, S, T, W, or Y
FGAQIRXL

SEQ ID NO: 765 - protein, 8 aa, Artificial Sequence
  Description of Artificial Sequence: Synthetic Peptide
  SITE (7)..(7): Xaa is A, C, G, H, M, N, V, W, or Y
FGAQLRXL

SEQ ID NO: 766 - protein, 8 aa, Artificial Sequence
  Description of Artificial Sequence: Synthetic Peptide
  SITE (7)..(7): Xaa is A, C, D, E, F, H, I, M, N, R, S, T, V, W, or Y
FGAQISXI

SEQ ID NO: 767 - protein, 8 aa, Artificial Sequence
  Description of Artificial Sequence: Synthetic Peptide
  SITE (7)..(7): Xaa is C, E, H, L, M, N, P, R, T, V, W, or Y
FGAQLSXI

SEQ ID NO: 768 - protein, 8 aa, Artificial Sequence
  Description of Artificial Sequence: Synthetic Peptide
  SITE (7)..(7): Xaa is C, D, F, I, M, N, Q, R, S, or Y
FGAQISXL

SEQ ID NO: 769 - protein, 8 aa, Artificial Sequence
  Description of Artificial Sequence: Synthetic Peptide
  SITE (7)..(7): Xaa is A, C, F, G, H, K, M, P, R, W, or Y
FGAQLSXL

SEQ ID NO: 770 - protein, 8 aa, Artificial Sequence
  Description of Artificial Sequence: Synthetic Peptide
  SITE (7)..(7): Xaa is A, C, D, E, G, I, K, L, M, P, R, S, W, or Y
FGASIDXI

SEQ ID NO: 771 - protein, 8 aa, Artificial Sequence
  Description of Artificial Sequence: Synthetic Peptide
  SITE (7)..(7): Xaa is C, F, H, I, M, N, Q, S, T, or W
FGASLDXI

SEQ ID NO: 772 - protein, 8 aa, Artificial Sequence
  Description of Artificial Sequence: Synthetic Peptide
  SITE (7)..(7): Xaa is A, C, F, H, I, K, L, P, V, W, or Y
FGASIDXL

SEQ ID NO: 773 - protein, 8 aa, Artificial Sequence
  Description of Artificial Sequence: Synthetic Peptide
  SITE (7)..(7): Xaa is D, F, I, M, P, Q, V, W, or Y
FGASLDXL

SEQ ID NO: 774 - protein, 8 aa, Artificial Sequence
  Description of Artificial Sequence: Synthetic Peptide
  SITE (7)..(7): Xaa is C, E, F, G, H, K, M, P, Q, V, W, or Y
FGASIRXI

SEQ ID NO: 775 - protein, 8 aa, Artificial Sequence
  Description of Artificial Sequence: Synthetic Peptide
  SITE (7)..(7): Xaa is C, D, E, I, M, N, R, S, or W
FGASLRXI

SEQ ID NO: 776 - protein, 8 aa, Artificial Sequence
  Description of Artificial Sequence: Synthetic Peptide
  SITE (7)..(7): Xaa is C, F, G, H, L, M, N, P, T, V, or W
FGASIRXL

SEQ ID NO: 777 - protein, 8 aa, Artificial Sequence
  Description of Artificial Sequence: Synthetic Peptide
  SITE (7)..(7): Xaa is A, F, H, I, M, or W
FGASLRXL

SEQ ID NO: 778 - protein, 8 aa, Artificial Sequence
  Description of Artificial Sequence: Synthetic Peptide
  SITE (7)..(7): Xaa is C, E, H, K, N, P, V, or Y
FGASISXI

SEQ ID NO: 779 - protein, 8 aa, Artificial Sequence
  Description of Artificial Sequence: Synthetic Peptide
  SITE (7)..(7): Xaa is C, G, H, P, R, W, or Y
FGASLSXI

SEQ ID NO: 780 - protein, 8 aa, Artificial Sequence
  Description of Artificial Sequence: Synthetic Peptide
  SITE (7)..(7): Xaa is C, E, I, M, R, V, W, or Y
FGASISXL

SEQ ID NO: 781 - protein, 8 aa, Artificial Sequence
  Description of Artificial Sequence: Synthetic Peptide
  SITE (7)..(7): Xaa is A, C, or N
FGASLSXL

SEQ ID NO: 782 - protein, 8 aa, Artificial Sequence
  Description of Artificial Sequence: Synthetic Peptide
  SITE (7)..(7): Xaa is A, C, D, E, F, H, I, K, L, M, P, R, S, W, or Y
FGGDIDXI

SEQ ID NO: 783 - protein, 8 aa, Artificial Sequence
  Description of Artificial Sequence: Synthetic Peptide
  SITE (7)..(7): Xaa is A, C, D, E, F, H, I, N, P, S, T, V, W, or Y
FGGDLDXI

SEQ ID NO: 784 - protein, 8 aa, Artificial Sequence
  Description of Artificial Sequence: Synthetic Peptide
  SITE (7)..(7): Xaa is C, D, E, F, H, M, N, P, Q, T, or Y
FGGDIDXL

SEQ ID NO: 785 - protein, 8 aa, Artificial Sequence
  Description of Artificial Sequence: Synthetic Peptide
  SITE (7)..(7): Xaa is A, C, F, I, L, N, Q, S, W, or Y
FGGDLDXL

SEQ ID NO: 786 - protein, 8 aa, Artificial Sequence
  Description of Artificial Sequence: Synthetic Peptide
  SITE (7)..(7): Xaa is A, C, D, H, K, L, M, N, P, Q, R, S, W, or Y
FGGDIRXI

SEQ ID NO: 787 - protein, 8 aa, Artificial Sequence
  Description of Artificial Sequence: Synthetic Peptide
  SITE (7)..(7): Xaa is C, D, E, I, M, P, S, V, W, or Y
FGGDLRXI

SEQ ID NO: 788 - protein, 8 aa, Artificial Sequence
  Description of Artificial Sequence: Synthetic Peptide
  SITE (7)..(7): Xaa is C, D, E, H, L, M, R, S, W, or Y
FGGDIRXL

SEQ ID NO: 789 - protein, 8 aa, Artificial Sequence
  Description of Artificial Sequence: Synthetic Peptide
  SITE (7)..(7): Xaa is C, D, F, P, Q, T, W, or Y
FGGDLRXL

SEQ ID NO: 790 - protein, 8 aa, Artificial Sequence
  Description of Artificial Sequence: Synthetic Peptide
  SITE (7)..(7): Xaa is C, H, I, M, P, Q, or Y
FGGDISXI

SEQ ID NO: 791 - protein, 8 aa, Artificial Sequence
  Description of Artificial Sequence: Synthetic Peptide
  SITE (7)..(7): Xaa is A, E, F, H, M, N, W, or Y
FGGDLSXI

SEQ ID NO: 792 - protein, 8 aa, Artificial Sequence
  Description of Artificial Sequence: Synthetic Peptide
  SITE (7)..(7): Xaa is D, F, I, L, M, P, Q, R, W, or Y
FGGDISXL

SEQ ID NO: 793 - protein, 8 aa, Artificial Sequence
  Description of Artificial Sequence: Synthetic Peptide
  SITE (7)..(7): Xaa is C, F, H, K, L, M, Q, W, or Y
FGGDLSXL

SEQ ID NO: 794 - protein, 8 aa, Artificial Sequence
  Description of Artificial Sequence: Synthetic Peptide
  SITE (7)..(7): Xaa is A, C, D, E, G, H, K, L, M, N, P, R, S, V, or Y
FGGEIDXI

SEQ ID NO: 795 - protein, 8 aa, Artificial Sequence
  Description of Artificial Sequence: Synthetic Peptide
  SITE (7)..(7): Xaa is C, D, E, G, I, K, L, M, N, P, Q, S, T, V, W, or Y
FGGELDXI

SEQ ID NO: 796 - protein, 8 aa, Artificial Sequence
  Description of Artificial Sequence: Synthetic Peptide
  SITE (7)..(7): Xaa is C, D, E, F, H, N, or Y
FGGEIDXL

SEQ ID NO: 797 - protein, 8 aa, Artificial Sequence
  Description of Artificial Sequence: Synthetic Peptide
  SITE (7)..(7): Xaa is C, E, F, H, M, or W
FGGELDXL

SEQ ID NO: 798 - protein, 8 aa, Artificial Sequence
  Description of Artificial Sequence: Synthetic Peptide
  SITE (7)..(7): Xaa is A, E, F, G, H, I, K, L, M, N, P, R, S, T, or Y
FGGEIRXI

SEQ ID NO: 799 - protein, 8 aa, Artificial Sequence
  Description of Artificial Sequence: Synthetic Peptide
  SITE (7)..(7): Xaa is C, D, E, G, H, I, N, Q, R, S, W, or Y
FGGELRXI

SEQ ID NO: 800 - protein, 8 aa, Artificial Sequence
  Description of Artificial Sequence: Synthetic Peptide
  SITE (7)..(7): Xaa is C, E, F, G, H, K, L, N, P, S, T, V, W, or Y
FGGEIRXL

SEQ ID NO: 801 - protein, 8 aa, Artificial Sequence
  Description of Artificial Sequence: Synthetic Peptide
  SITE (7)..(7): Xaa is A, E, H, I, K, P, S, T, or V
FGGELRXL

SEQ ID NO: 802 - protein, 8 aa, Artificial Sequence
  Description of Artificial Sequence: Synthetic Peptide
  SITE (7)..(7): Xaa is C, E, F, H, I, K, M, N, Q, S, T, V, and W
FGGEISXI

SEQ ID NO: 803 - protein, 8 aa, Artificial Sequence
  Description of Artificial Sequence: Synthetic Peptide
  SITE (7)..(7): Xaa is A, C, F, H, I, K, L, M, P, Q, and W
FGGELSXI

SEQ ID NO: 804 - protein, 8 aa, Artificial Sequence
  Description of Artificial Sequence: Synthetic Peptide
  SITE (7)..(7): Xaa is A, C, E, I, M, N, Q, R, T, and V
FGGEISXL

SEQ ID NO: 805 - protein, 8 aa, Artificial Sequence
  Description of Artificial Sequence: Synthetic Peptide
  SITE (7)..(7): Xaa is C, F, G, H, I, K, Q, R, T, V, and Y
FGGELSXL

SEQ ID NO: 806 - protein, 8 aa, Artificial Sequence
  Description of Artificial Sequence: Synthetic Peptide
  SITE (7)..(7): Xaa is A, C, D, E, G, H, I, K, M, P, Q, R, S, T, V, W, or Y
FGGNIDXI

SEQ ID NO: 807 - protein, 8 aa, Artificial Sequence
  Description of Artificial Sequence: Synthetic Peptide
  SITE (7)..(7): Xaa is C, D, E, F, H, I, K, L, M, N, P, Q, R, S, T, V, W, or Y
FGGNLDXI

SEQ ID NO: 808 - protein, 8 aa, Artificial Sequence
  Description of Artificial Sequence: Synthetic Peptide
  SITE (7)..(7): Xaa is C, D, F, G, H, I, M, N, P, Q, R, T, V, W, or Y
FGGNIDXL

SEQ ID NO: 809 - protein, 8 aa, Artificial Sequence
  Description of Artificial Sequence: Synthetic Peptide
  SITE (7)..(7): Xaa is C, F, H, K, L, M, N, P, Q, R, or W
FGGNLDXL

SEQ ID NO: 810 - protein, 8 aa, Artificial Sequence
  Description of Artificial Sequence: Synthetic Peptide
  SITE (7)..(7): Xaa is A, C, D, F, H, I, K, L, N, P, Q, R, V, W, or Y
FGGNIRXI

SEQ ID NO: 811 - protein, 8 aa, Artificial Sequence
  Description of Artificial Sequence: Synthetic Peptide
  SITE (7)..(7): Xaa is A, C, H, M, P, R, S, T, W, or Y
FGGNLRXI

SEQ ID NO: 812 - protein, 8 aa, Artificial Sequence
  Description of Artificial Sequence: Synthetic Peptide
  SITE (7)..(7): Xaa is A, C, D, E, K, L, M, N, P, Q, S, T, V, or W
FGGNIRXL

SEQ ID NO: 813 - protein, 8 aa, Artificial Sequence
  Description of Artificial Sequence: Synthetic Peptide
  SITE (7)..(7): Xaa is A, C, D, F, I, K, M, N, R, T, W, or Y
FGGNLRXL

SEQ ID NO: 814 - protein, 8 aa, Artificial Sequence
  Description of Artificial Sequence: Synthetic Peptide
  SITE (7)..(7): Xaa is F, G, H, K, L, M, N, P, Q, R, S, W, or Y
FGGNISXI

SEQ ID NO: 815 - protein, 8 aa, Artificial Sequence
  Description of Artificial Sequence: Synthetic Peptide
  SITE (7)..(7): Xaa is A, C, F, M, N, R, S, T, W, or Y
FGGNLSXI

SEQ ID NO: 816 - protein, 8 aa, Artificial Sequence
  Description of Artificial Sequence: Synthetic Peptide
  SITE (7)..(7): Xaa is A, C, D, F, H, I, K, M, P, Q, W, or Y
FGGNISXL

SEQ ID NO: 817 - protein, 8 aa, Artificial Sequence
  Description of Artificial Sequence: Synthetic Peptide
  SITE (7)..(7): Xaa is A, C, D, F, N, or W
FGGNLSXL

SEQ ID NO: 818 - protein, 8 aa, Artificial Sequence
  Description of Artificial Sequence: Synthetic Peptide
  SITE (7)..(7): Xaa is C, D, E, H, I, K, L, M, N, P, Q, R, S, T, V, W, or Y
FGGQIDXI

SEQ ID NO: 819 - protein, 8 aa, Artificial Sequence
  Description of Artificial Sequence: Synthetic Peptide
  SITE (7)..(7): Xaa is A, C, D, G, H, I, K, L, M, N, P, Q, W, or Y
FGGQLDXI

SEQ ID NO: 820 - protein, 8 aa, Artificial Sequence
  Description of Artificial Sequence: Synthetic Peptide
  SITE (7)..(7): Xaa is A, C, D, E, G, K, P, Q, R, or W
FGGQIDXL

SEQ ID NO: 821 - protein, 8 aa, Artificial Sequence
  Description of Artificial Sequence: Synthetic Peptide
  SITE (7)..(7): Xaa is C, E, H, M, N, P, T, W, or Y
FGGQLDXL

SEQ ID NO: 822 - protein, 8 aa, Artificial Sequence
  Description of Artificial Sequence: Synthetic Peptide
  SITE (7)..(7): Xaa is A, C, D, E, F, G, H, I, L, M, N, P, Q, R, S, T, V, W, or Y
FGGQIRXI

SEQ ID NO: 823 - protein, 8 aa, Artificial Sequence
  Description of Artificial Sequence: Synthetic Peptide
  SITE (7)..(7): Xaa is C, D, H, I, K, M, N, P, Q, R, S, T, V, W, or Y
FGGQLRXI

SEQ ID NO: 824 - protein, 8 aa, Artificial Sequence
  Description of Artificial Sequence: Synthetic Peptide
  SITE (7)..(7): Xaa is A, C, G, H, I, K, M, N, P, S, T, V, W, or Y
FGGQIRXL

SEQ ID NO: 825 - protein, 8 aa, Artificial Sequence
  Description of Artificial Sequence: Synthetic Peptide
  SITE (7)..(7): Xaa is A, C, F, H, I, K, L, M, N, P, Q, R, T, W, or Y
FGGQLRXL

SEQ ID NO: 826 - protein, 8 aa, Artificial Sequence
  Description of Artificial Sequence: Synthetic Peptide
  SITE (7)..(7): Xaa is A, C, D, E, G, H, I, K, L, M, N, R, S, T, V, W, or Y
FGGQISXI

SEQ ID NO: 827 - protein, 8 aa, Artificial Sequence
  Description of Artificial Sequence: Synthetic Peptide
  SITE (7)..(7): Xaa is A, C, D, E, F, H, I, L, P, Q, R, S, T, V, W, or Y
FGGQLSXI

SEQ ID NO: 828 - protein, 8 aa, Artificial Sequence
  Description of Artificial Sequence: Synthetic Peptide
  SITE (7)..(7): Xaa is A, C, E, H, I, K, M, N, R, T, or V
FGGQISXL

SEQ ID NO: 829 - protein, 8 aa, Artificial Sequence
  Description of Artificial Sequence: Synthetic Peptide
  SITE (7)..(7): Xaa is C, G, H, I, N, Q, R, V, or W
FGGQLSXL

SEQ ID NO: 830 - protein, 8 aa, Artificial Sequence
  Description of Artificial Sequence: Synthetic Peptide
  SITE (7)..(7): Xaa is A, C, G, H, I, K, L, M, Q, T, or W
FGGSIDXI

SEQ ID NO: 831 - protein, 8 aa, Artificial Sequence
  Description of Artificial Sequence: Synthetic Peptide
  SITE (7)..(7): Xaa is C, D, E, F, H, I, K, M, Q, T, or W
FGGSLDXI

SEQ ID NO: 832 - protein, 8 aa, Artificial Sequence
  Description of Artificial Sequence: Synthetic Peptide
  SITE (7)..(7): Xaa is C, E, F, G, K, R, or W
FGGSIDXL

SEQ ID NO: 833 - protein, 8 aa, Artificial Sequence
  Description of Artificial Sequence: Synthetic Peptide
  SITE (7)..(7): Xaa is F, H, K, R, T, or W
FGGSLDXL

SEQ ID NO: 834 - protein, 8 aa, Artificial Sequence
  Description of Artificial Sequence: Synthetic Peptide
  SITE (7)..(7): Xaa is A, C, D, F, H, I, K, M, P, R, T, W, or Y
FGGSIRXI

SEQ ID NO: 835 - protein, 8 aa, Artificial Sequence
  Description of Artificial Sequence: Synthetic Peptide
  SITE (7)..(7): Xaa is C, F, H, K, L, M, R, T, or W
FGGSLRXI

SEQ ID NO: 836 - protein, 8 aa, Artificial Sequence
  Description of Artificial Sequence: Synthetic Peptide
  SITE (7)..(7): Xaa is C, D, E, I, L, M, P, Q, R, T, V, W, or Y
FGGSIRXL

SEQ ID NO: 837 - protein, 8 aa, Artificial Sequence
  Description of Artificial Sequence: Synthetic Peptide
  SITE (7)..(7): Xaa is C, F, or W
FGGSLRXL

SEQ ID NO: 838 - protein, 8 aa, Artificial Sequence
  Description of Artificial Sequence: Synthetic Peptide
  SITE (7)..(7): Xaa is A, C, G, H, I, K, L, M, Q, T, W, or Y
FGGSISXI

SEQ ID NO: 839 - protein, 8 aa, Artificial Sequence
  Description of Artificial Sequence: Synthetic Peptide
  SITE (7)..(7): Xaa is H, N, Q, W, or Y
FGGSLSXI

SEQ ID NO: 840 - protein, 8 aa, Artificial Sequence
  Description of Artificial Sequence: Synthetic Peptide
  SITE (7)..(7): Xaa is C, D, E, I, L, M, P, Q, R, T, V, W, or Y
FGGSISXL

SEQ ID NO: 841 - protein, 8 aa, Artificial Sequence
  Description of Artificial Sequence: Synthetic Peptide
  SITE (7)..(7): Xaa is C, F, H, I, or Y
FGGSLSXL

SEQ ID NO: 842 - protein, 8 aa, Artificial Sequence
  Description of Artificial Sequence: Synthetic Peptide
  SITE (7)..(7): Xaa is A, F, H, P, Q, R, W, or Y
FGLDIDXI

SEQ ID NO: 843 - protein, 8 aa, Artificial Sequence
  Description of Artificial Sequence: Synthetic Peptide
  SITE (7)..(7): Xaa is C, D, H, L, N, S, or Y
FGLDLDXI

SEQ ID NO: 844 - protein, 8 aa, Artificial Sequence
  Description of Artificial Sequence: Synthetic Peptide
  SITE (7)..(7): Xaa is A, C, F, H, K, M, N, S, T, V, or Y
FGLDIDXL

SEQ ID NO: 845 - protein, 8 aa, Artificial Sequence
  Description of Artificial Sequence: Synthetic Peptide
  SITE (7)..(7): Xaa is C, F, I, K, M, N, W, or Y
FGLDLDXL

SEQ ID NO: 846 - protein, 8 aa, Artificial Sequence
  Description of Artificial Sequence: Synthetic Peptide
  SITE (7)..(7): Xaa is C, E, H, M, P, Q, R, S, T, V, W, or Y
FGLDIRXI

SEQ ID NO: 847 - protein, 8 aa, Artificial Sequence
  Description of Artificial Sequence: Synthetic Peptide
  SITE (7)..(7): Xaa is A, C, E, I, L, M, P, Q, R, S ,T ,V, W, or Y
FGLDLRXI

SEQ ID NO: 848 - protein, 8 aa, Artificial Sequence
  Description of Artificial Sequence: Synthetic Peptide
  SITE (7)..(7): Xaa is C, D, E, F, K, M, N, P, Q, R, V, or Y
FGLDIRXL

SEQ ID NO: 849 - protein, 8 aa, Artificial Sequence
  Description of Artificial Sequence: Synthetic Peptide
  SITE (7)..(7): Xaa is C, G, K, P, Q, R, W, or Y
FGLDLRXL

SEQ ID NO: 850 - protein, 8 aa, Artificial Sequence
  Description of Artificial Sequence: Synthetic Peptide
  SITE (7)..(7): Xaa is H, T, or W
FGLDLSXI

SEQ ID NO: 851 - protein, 8 aa, Artificial Sequence
  Description of Artificial Sequence: Synthetic Peptide
  SITE (7)..(7): Xaa is E, G, M, N, P, Q, W, or Y
FGLDISXL

SEQ ID NO: 852 - protein, 8 aa, Artificial Sequence
  Description of Artificial Sequence: Synthetic Peptide
  SITE (7)..(7): Xaa is E, M, Q, or W
FGLDLSXL

SEQ ID NO: 853 - protein, 8 aa, Artificial Sequence
  Description of Artificial Sequence: Synthetic Peptide
  SITE (7)..(7): Xaa is A, C, F, G, I, L, M, P, Q, R, T, W, or Y
FGLEIDXI

SEQ ID NO: 854 - protein, 8 aa, Artificial Sequence
  Description of Artificial Sequence: Synthetic Peptide
  SITE (7)..(7): Xaa is F, H, I, M, N, P, or W
FGLELDXI

SEQ ID NO: 855 - protein, 8 aa, Artificial Sequence
  Description of Artificial Sequence: Synthetic Peptide
  SITE (7)..(7): Xaa is C, D, F, H, I, M, P, Q, W, or Y
FGLEIDXL

SEQ ID NO: 856 - protein, 8 aa, Artificial Sequence
  Description of Artificial Sequence: Synthetic Peptide
  SITE (7)..(7): Xaa is C, H, I, K, N, T, V ,W, or Y
FGLELDXL

SEQ ID NO: 857 - protein, 8 aa, Artificial Sequence
  Description of Artificial Sequence: Synthetic Peptide
  SITE (7)..(7): Xaa is A, C, D, E, F, H, I, M, P, Q, R, T, V, W, or Y
FGLEIRXI

SEQ ID NO: 858 - protein, 8 aa, Artificial Sequence
  Description of Artificial Sequence: Synthetic Peptide
  SITE (7)..(7): Xaa ia A, C, E, F, I, K, Q, S, T, V, W, or Y
FGLELRXI

SEQ ID NO: 859 - protein, 8 aa, Artificial Sequence
  Description of Artificial Sequence: Synthetic Peptide
  SITE (7)..(7): Xaa is A, C, D, F, H, M, Q, T, W, or Y
FGLEIRXL

SEQ ID NO: 860 - protein, 8 aa, Artificial Sequence
  Description of Artificial Sequence: Synthetic Peptide
  SITE (7)..(7): Xaa is C, F, H, M, P, R, T, V, or Y
FGLELRXL

SEQ ID NO: 861 - protein, 8 aa, Artificial Sequence
  Description of Artificial Sequence: Synthetic Peptide
  SITE (7)..(7): Xaa is A, C, D, H, I, N, T, or W
FGLEISXI

SEQ ID NO: 862 - protein, 8 aa, Artificial Sequence
  Description of Artificial Sequence: Synthetic Peptide
  SITE (7)..(7): Xaa is H, K, L, M, N, T, or Y
FGLELSXI

SEQ ID NO: 863 - protein, 8 aa, Artificial Sequence
  Description of Artificial Sequence: Synthetic Peptide
  SITE (7)..(7): Xaa is C, D, F, H, I, P, or Q
FGLEISXL

SEQ ID NO: 864 - protein, 8 aa, Artificial Sequence
  Description of Artificial Sequence: Synthetic Peptide
  SITE (7)..(7): Xaa is C, S, T, W, or Y
FGLELSXL

SEQ ID NO: 865 - protein, 8 aa, Artificial Sequence
  Description of Artificial Sequence: Synthetic Peptide
  SITE (7)..(7): Xaa is C, G, I, L, P, Q, V, W, or Y
FGLNIDXI

SEQ ID NO: 866 - protein, 8 aa, Artificial Sequence
  Description of Artificial Sequence: Synthetic Peptide
  SITE (7)..(7): Xaa is C, E, F, G, H, K, L, N, P, Q, R, T, or Y
FGLNLDXI

SEQ ID NO: 867 - protein, 8 aa, Artificial Sequence
  Description of Artificial Sequence: Synthetic Peptide
  SITE (7)..(7): Xaa is C, D, F, G, H, M, P, Q, T, V, or Y
FGLNIDXL

SEQ ID NO: 868 - protein, 8 aa, Artificial Sequence
  Description of Artificial Sequence: Synthetic Peptide
  SITE (7)..(7): Xaa is C, D, F, H, K, M, Q, S, V, or W
FGLNLDXL

SEQ ID NO: 869 - protein, 8 aa, Artificial Sequence
  Description of Artificial Sequence: Synthetic Peptide
  SITE (7)..(7): Xaa is A, C, D, E, F, G, H, I, L, M, N, P, Q, R, T, V, W, or Y
FGLNIRXI

SEQ ID NO: 870 - protein, 8 aa, Artificial Sequence
  Description of Artificial Sequence: Synthetic Peptide
  SITE (7)..(7): Xaa is A, D, G, H, I, K, L, M, N, P, R, S, T, W, or Y
FGLNLRXI

SEQ ID NO: 871 - protein, 8 aa, Artificial Sequence
  Description of Artificial Sequence: Synthetic Peptide
  SITE (7)..(7): Xaa is A, C, D, E, F, G, H, I, K, L, M, N, Q, R, V, W, or Y
FGLNIRXL

SEQ ID NO: 872 - protein, 8 aa, Artificial Sequence
  Description of Artificial Sequence: Synthetic Peptide
  SITE (7)..(7): Xaa is A, C, I, L, M, S, T, or Y
FGLNLRXL

SEQ ID NO: 873 - protein, 8 aa, Artificial Sequence
  Description of Artificial Sequence: Synthetic Peptide
  SITE (7)..(7): Xaa is A, C, G, H, I, L, M, V, W, or Y
FGLNISXI

SEQ ID NO: 874 - protein, 8 aa, Artificial Sequence
  Description of Artificial Sequence: Synthetic Peptide
  SITE (7)..(7): Xaa is C, D, H, L, P, T, or Y
FGLNLSXI

SEQ ID NO: 875 - protein, 8 aa, Artificial Sequence
  Description of Artificial Sequence: Synthetic Peptide
  SITE (7)..(7): Xaa is C, F, H, I, K, M, N, P, V, or W
FGLNISXL

SEQ ID NO: 876 - protein, 8 aa, Artificial Sequence
  Description of Artificial Sequence: Synthetic Peptide
  SITE (7)..(7): Xaa is A, D, M, R, or Y
FGLNLSXL

SEQ ID NO: 877 - protein, 8 aa, Artificial Sequence
  Description of Artificial Sequence: Synthetic Peptide
  SITE (7)..(7): Xaa is A, C, D, E, F, G, H, I, L, M, P, Q, R, S, or W
FGLQIDXI

SEQ ID NO: 878 - protein, 8 aa, Artificial Sequence
  Description of Artificial Sequence: Synthetic Peptide
  SITE (7)..(7): Xaa is A, C, D, F, H, I, K, L, N, P, Q, R, S, T, V, W, or Y
FGLQLDXI

SEQ ID NO: 879 - protein, 8 aa, Artificial Sequence
  Description of Artificial Sequence: Synthetic Peptide
  SITE (7)..(7): Xaa is C, D, E ,F ,G, H, L, M, P, R, T, W, or Y
FGLQIDXL

SEQ ID NO: 880 - protein, 8 aa, Artificial Sequence
  Description of Artificial Sequence: Synthetic Peptide
  SITE (7)..(7): Xaa is A, C, E, H, I, K, M, N, P, R, or W
FGLQLDXL

SEQ ID NO: 881 - protein, 8 aa, Artificial Sequence
  Description of Artificial Sequence: Synthetic Peptide
  SITE (7)..(7): Xaa is D, F, H, I, K, L, M, N, P, Q, R, T, V, W, or Y
FGLQIRXI

SEQ ID NO: 882 - protein, 8 aa, Artificial Sequence
  Description of Artificial Sequence: Synthetic Peptide
  SITE (7)..(7): Xaa is A, C, D, F, G, H, I, L, M, N, P, Q, T, v, W, or Y
FGLQLRXI

SEQ ID NO: 883 - protein, 8 aa, Artificial Sequence
  Description of Artificial Sequence: Synthetic Peptide
  SITE (7)..(7): Xaa is A, C, D, E, F, G, H, I, K, L, M, N, P, Q, S, T, V, W, or Y
FGLQIRXL

SEQ ID NO: 884 - protein, 8 aa, Artificial Sequence
  Description of Artificial Sequence: Synthetic Peptide
  SITE (7)..(7): Xaa is A, D, F, G, H, I, M, P, T, or V
FGLQLRXL

SEQ ID NO: 885 - protein, 8 aa, Artificial Sequence
  Description of Artificial Sequence: Synthetic Peptide
  SITE (7)..(7): Xaa is C, F, G, H, L, M, P, Q, W, or Y
FGLQISXI

SEQ ID NO: 886 - protein, 8 aa, Artificial Sequence
  Description of Artificial Sequence: Synthetic Peptide
  SITE (7)..(7): Xaa is A, C, E, H, M, N ,Q, V, W, or Y
FGLQLSXI

SEQ ID NO: 887 - protein, 8 aa, Artificial Sequence
  Description of Artificial Sequence: Synthetic Peptide
  SITE (7)..(7): Xaa is A, C, D, H, L, M, N, P, or W
FGLQISXL

SEQ ID NO: 888 - protein, 8 aa, Artificial Sequence
  Description of Artificial Sequence: Synthetic Peptide
  SITE (7)..(7): Xaa is A, C, H, I, K, N, P, or W
FGLQLSXL

SEQ ID NO: 889 - protein, 8 aa, Artificial Sequence
  Description of Artificial Sequence: Synthetic Peptide
  SITE (7)..(7): Xaa is H, C, I, P, W, or Y
FGLSLDXI

SEQ ID NO: 890 - protein, 8 aa, Artificial Sequence
  Description of Artificial Sequence: Synthetic Peptide
  SITE (7)..(7): Xaa is C, G, H, W, or Y
FGLSIDXL

SEQ ID NO: 891 - protein, 8 aa, Artificial Sequence
  Description of Artificial Sequence: Synthetic Peptide
  SITE (7)..(7): Xaa is A, C, E, F, H, L, M, P, R, or V
FGLSIRXI

SEQ ID NO: 892 - protein, 8 aa, Artificial Sequence
  Description of Artificial Sequence: Synthetic Peptide
  SITE (7)..(7): Xaa is C, I, K, M, P, Q, R, S, W, or Y
FGLSLRXI

SEQ ID NO: 893 - protein, 8 aa, Artificial Sequence
  Description of Artificial Sequence: Synthetic Peptide
  SITE (7)..(7): Xaa is A, C, G, H, I, K, M, N, P, R, S, V, or W
FGLSIRXL

SEQ ID NO: 894 - protein, 8 aa, Artificial Sequence
  Description of Artificial Sequence: Synthetic Peptide
  SITE (7)..(7): Xaa is C, F, H, I, N, or P
FGLSLRXL

SEQ ID NO: 895 - protein, 8 aa, Artificial Sequence
  Description of Artificial Sequence: Synthetic Peptide
  SITE (7)..(7): Xaa is H, K, Q, or R
FGLSISXI

SEQ ID NO: 896 - protein, 8 aa, Artificial Sequence
  Description of Artificial Sequence: Synthetic Peptide
  SITE (7)..(7): Xaa is G or N
FGLSLSXI

SEQ ID NO: 897 - protein, 8 aa, Artificial Sequence
  Description of Artificial Sequence: Synthetic Peptide
  SITE (7)..(7): Xaa is C, H, R, T, or W
FGLSISXL

SEQ ID NO: 898 - protein, 8 aa, Artificial Sequence
  Description of Artificial Sequence: Synthetic Peptide
  SITE (7)..(7): Xaa is N or W
FGLSLSXL

SEQ ID NO: 899 - protein, 8 aa, Artificial Sequence
  Description of Artificial Sequence: Synthetic Peptide
  SITE (7)..(7): Xaa is A, C, D, F, G, H, I, K, L, P, Q, R, W or Y
FGNDIDXI

SEQ ID NO: 900 - protein, 8 aa, Artificial Sequence
  Description of Artificial Sequence: Synthetic Peptide
  SITE (7)..(7): Xaa is C, D, E, H, Q, S, W, or Y
FGNDLDXI

SEQ ID NO: 901 - protein, 8 aa, Artificial Sequence
  Description of Artificial Sequence: Synthetic Peptide
  SITE (7)..(7): Xaa is A, C, D, E, F, G, H, I, K, L, or W
FGNDIDXL

SEQ ID NO: 902 - protein, 8 aa, Artificial Sequence
  Description of Artificial Sequence: Synthetic Peptide
  SITE (7)..(7): Xaa is C, G, H, T, W, or Y
FGNDLDXL

SEQ ID NO: 903 - protein, 8 aa, Artificial Sequence
  Description of Artificial Sequence: Synthetic Peptide
  SITE (7)..(7): Xaa is C, D, E, F, G, H ,I, K, L, M, N, P, R, V, or W
FGNDIRXI

SEQ ID NO: 904 - protein, 8 aa, Artificial Sequence
  Description of Artificial Sequence: Synthetic Peptide
  SITE (7)..(7): Xaa is C, D, F, G, H, I, K, M, N, P, Q, R, S, V, or Y
FGNDLRXI

SEQ ID NO: 905 - protein, 8 aa, Artificial Sequence
  Description of Artificial Sequence: Synthetic Peptide
  SITE (7)..(7): Xaa is A, C, E, G, H ,M, P, Q, R, T, V, W, or Y
FGNDIRXL

SEQ ID NO: 906 - protein, 8 aa, Artificial Sequence
  Description of Artificial Sequence: Synthetic Peptide
  SITE (7)..(7): Xaa is A, C, D, E, F, H, I, M, N, P, Q, W, or Y
FGNDLRXL

SEQ ID NO: 907 - protein, 8 aa, Artificial Sequence
  Description of Artificial Sequence: Synthetic Peptide
  SITE (7)..(7): Xaa is C, H, L, M, N, Q, R, T, W, or Y
FGNDISXI

SEQ ID NO: 908 - protein, 8 aa, Artificial Sequence
  Description of Artificial Sequence: Synthetic Peptide
  SITE (7)..(7): Xaa is C, D, F ,G, M, N, Q, R, S, V, W, or Y
FGNDLSXI

SEQ ID NO: 909 - protein, 8 aa, Artificial Sequence
  Description of Artificial Sequence: Synthetic Peptide
  SITE (7)..(7): Xaa is C, H, M, N, R, V, W, or Y
FGNDISXL

SEQ ID NO: 910 - protein, 8 aa, Artificial Sequence
  Description of Artificial Sequence: Synthetic Peptide
  SITE (7)..(7): Xaa is C, D, E, I, Q, R, S, or W
FGNDLSXL

SEQ ID NO: 911 - protein, 8 aa, Artificial Sequence
  Description of Artificial Sequence: Synthetic Peptide
  SITE (7)..(7): Xaa is A, D, E, F, G, H, I, L, M, N, P, Q, W, or Y
FGNEIDXI

SEQ ID NO: 912 - protein, 8 aa, Artificial Sequence
  Description of Artificial Sequence: Synthetic Peptide
  SITE (7)..(7): Xaa is A, C, E, F, G, H, I, M, P, Q, R, S, T, or Y
FGNELDXI

SEQ ID NO: 913 - protein, 8 aa, Artificial Sequence
  Description of Artificial Sequence: Synthetic Peptide
  SITE (7)..(7): Xaa is A, C, D, E, F, H, I, K, M, N, R, or W
FGNEIDXL

SEQ ID NO: 914 - protein, 8 aa, Artificial Sequence
  Description of Artificial Sequence: Synthetic Peptide
  SITE (7)..(7): Xaa is A, C, D, E, F, G, M, N, P, Q, T, W, or Y
FGNELDXL

SEQ ID NO: 915 - protein, 8 aa, Artificial Sequence
  Description of Artificial Sequence: Synthetic Peptide
  SITE (7)..(7): Xaa is A, C, F, G, H, I, K, M, N, P, Q, T, V, or Y
FGNELRXI

SEQ ID NO: 916 - protein, 8 aa, Artificial Sequence
  Description of Artificial Sequence: Synthetic Peptide
  SITE (7)..(7): Xaa is A, C, D, E, F, G, H ,I ,K, M, N, P, Q, R, T, V, W, or Y
FGNEIRXL

SEQ ID NO: 917 - protein, 8 aa, Artificial Sequence
  Description of Artificial Sequence: Synthetic Peptide
  SITE (7)..(7): Xaa is A, C, F, G, K, L, M, N, P, R, S, T, V, W, or Y
FGNELRXL

SEQ ID NO: 918 - protein, 8 aa, Artificial Sequence
  Description of Artificial Sequence: Synthetic Peptide
  SITE (7)..(7): Xaa is A, C, I, M, N, Q, T, W, or Y
FGNEISXI

SEQ ID NO: 919 - protein, 8 aa, Artificial Sequence
  Description of Artificial Sequence: Synthetic Peptide
  SITE (7)..(7): Xaa is C, D, H, I, K, P, R, S, V, W, or Y
FGNELSXI

SEQ ID NO: 920 - protein, 8 aa, Artificial Sequence
  Description of Artificial Sequence: Synthetic Peptide
  SITE (7)..(7): Xaa is C, E, G, H, K, M, N, R, T, or Y
FGNEISXL

SEQ ID NO: 921 - protein, 8 aa, Artificial Sequence
  Description of Artificial Sequence: Synthetic Peptide
  SITE (7)..(7): Xaa is A, C, G, H, I, M, W, or Y
FGNELSXL

SEQ ID NO: 922 - protein, 8 aa, Artificial Sequence
  Description of Artificial Sequence: Synthetic Peptide
  SITE (7)..(7): Xaa is A, C, D, F, G, H, I, K, M, N, P, Q, R, T, V, W, or Y
FGNNIDXI

SEQ ID NO: 923 - protein, 8 aa, Artificial Sequence
  Description of Artificial Sequence: Synthetic Peptide
  SITE (7)..(7): Xaa is C, D, F, G ,H, K, M, N, P, Q, R, S, T, or W
FGNNLDXI

SEQ ID NO: 924 - protein, 8 aa, Artificial Sequence
  Description of Artificial Sequence: Synthetic Peptide
  SITE (7)..(7): Xaa is A, C, D, E, F, G, H, K, M, N, P, R, S, T, W, or Y
FGNNIDXL

SEQ ID NO: 925 - protein, 8 aa, Artificial Sequence
  Description of Artificial Sequence: Synthetic Peptide
  SITE (7)..(7): Xaa is C, E, F, H, K, M, P, or Y
FGNNLDXL

SEQ ID NO: 926 - protein, 8 aa, Artificial Sequence
  Description of Artificial Sequence: Synthetic Peptide
  SITE (7)..(7): Xaa is C, E, F, G, H, I, K, M, P, Q, R, W, or Y
FGNNIRXI

SEQ ID NO: 927 - protein, 8 aa, Artificial Sequence
  Description of Artificial Sequence: Synthetic Peptide
  SITE (7)..(7): Xaa is A, C, E, F, G, I, K, L, M, N, P, Q, R, T, V, W, or Y
FGNNLRXI

SEQ ID NO: 928 - protein, 8 aa, Artificial Sequence
  Description of Artificial Sequence: Synthetic Peptide
  SITE (7)..(7): Xaa is A, C, D, E, F, G, H, I, L, M, N, P, Q, S, T, V, or W
FGNNIRXL

SEQ ID NO: 929 - protein, 8 aa, Artificial Sequence
  Description of Artificial Sequence: Synthetic Peptide
  SITE (7)..(7): Xaa is A, C, D, E, F, G, H, K, M, N, P, Q, R, S, V, W, or Y
FGNNLRXL

SEQ ID NO: 930 - protein, 8 aa, Artificial Sequence
  Description of Artificial Sequence: Synthetic Peptide
  SITE (7)..(7): Xaa is A, C, E, F, G, H, K, L, M, N, P, Q, R, S, T, W, or Y
FGNNISXI

SEQ ID NO: 931 - protein, 8 aa, Artificial Sequence
  Description of Artificial Sequence: Synthetic Peptide
  SITE (7)..(7): Xaa is A, C, D, E, F, K, M, R, T, V, W, or Y
FGNNLSXI

SEQ ID NO: 932 - protein, 8 aa, Artificial Sequence
  Description of Artificial Sequence: Synthetic Peptide
  SITE (7)..(7): Xaa is C, D, E, F, G, H, M, N, P, R, W, or Y
FGNNISXL

SEQ ID NO: 933 - protein, 8 aa, Artificial Sequence
  Description of Artificial Sequence: Synthetic Peptide
  SITE (7)..(7): Xaa is A, C, E, F, H, K, M, N, P, R, V, W, or Y
FGNNLSXL

SEQ ID NO: 934 - protein, 8 aa, Artificial Sequence
  Description of Artificial Sequence: Synthetic Peptide
  SITE (7)..(7): Xaa is A, C, D, F, G, H, I, K, M, N, P, Q, S, or Y
FGNQIDXI

SEQ ID NO: 935 - protein, 8 aa, Artificial Sequence
  Description of Artificial Sequence: Synthetic Peptide
  SITE (7)..(7): Xaa is A, C, D, E, F, G, H, I, K, L, M, P, Q, V, W, or Y
FGNQLDXI

SEQ ID NO: 936 - protein, 8 aa, Artificial Sequence
  Description of Artificial Sequence: Synthetic Peptide
  SITE (7)..(7): Xaa is C, E, F, G, I, L, M, N, R, S, V, W, or Y
FGNQIDXL

SEQ ID NO: 937 - protein, 8 aa, Artificial Sequence
  Description of Artificial Sequence: Synthetic Peptide
  SITE (7)..(7): Xaa is C, D, K, M, P, Q, S, T, or V
FGNQLDXL

SEQ ID NO: 938 - protein, 8 aa, Artificial Sequence
  Description of Artificial Sequence: Synthetic Peptide
  SITE (7)..(7): Xaa is A, C, D, E, G, H, I, K, L, M, N, P, R, T, V, W, or Y
FGNQIRXI

SEQ ID NO: 939 - protein, 8 aa, Artificial Sequence
  Description of Artificial Sequence: Synthetic Peptide
  SITE (7)..(7): Xaa is A, C, D, H, I, K, L, M, P, Q, R, S, T, V ,W, or Y
FGNQLRXI

SEQ ID NO: 940 - protein, 8 aa, Artificial Sequence
  Description of Artificial Sequence: Synthetic Peptide
  SITE (7)..(7): Xaa is A, C, D, E, H, K, P, Q, R, or W
FGNQIRXL

SEQ ID NO: 941 - protein, 8 aa, Artificial Sequence
  Description of Artificial Sequence: Synthetic Peptide
  SITE (7)..(7): Xaa is A, C, F, G, H, M, N, P, Q, T, W, or Y
FGNQLRXL

SEQ ID NO: 942 - protein, 8 aa, Artificial Sequence
  Description of Artificial Sequence: Synthetic Peptide
  SITE (7)..(7): Xaa is A, C, F, G, H, M, N, S, T, V, W, or Y
FGNQISXI

SEQ ID NO: 943 - protein, 8 aa, Artificial Sequence
  Description of Artificial Sequence: Synthetic Peptide
  SITE (7)..(7): Xaa is A, C, D, F, G, H, I, K, M, N, Q, R, S,T, V, W, or Y
FGNQLSXI

SEQ ID NO: 944 - protein, 8 aa, Artificial Sequence
  Description of Artificial Sequence: Synthetic Peptide
  SITE (7)..(7): Xaa is C, D,E, H, I, L, M, N, P, Q, R, S, W, or Y
FGNQISXL

SEQ ID NO: 945 - protein, 8 aa, Artificial Sequence
  Description of Artificial Sequence: Synthetic Peptide
  SITE (7)..(7): Xaa is A, C, F, G, H, M, P, T, or Y
FGNQLSXL

SEQ ID NO: 946 - protein, 8 aa, Artificial Sequence
  Description of Artificial Sequence: Synthetic Peptide
  SITE (7)..(7): Xaa is A, C, D, G, H, I, K, L, M, P, R, S, V, or Y
FGNSIDXI

SEQ ID NO: 947 - protein, 8 aa, Artificial Sequence
  Description of Artificial Sequence: Synthetic Peptide
  SITE (7)..(7): Xaa is A, C, G, H, I, K, M, Q, R, T, V, W, or Y
FGNSLDXI

SEQ ID NO: 948 - protein, 8 aa, Artificial Sequence
  Description of Artificial Sequence: Synthetic Peptide
  SITE (7)..(7): Xaa is C, D, F, H, M, N, P, R, S, V, W, or Y
FGNSIDXL

SEQ ID NO: 949 - protein, 8 aa, Artificial Sequence
  Description of Artificial Sequence: Synthetic Peptide
  SITE (7)..(7): Xaa is A, C, F, H, I, K, L, M, P, Q, T, V, W, or Y
FGNSLDXL

SEQ ID NO: 950 - protein, 8 aa, Artificial Sequence
  Description of Artificial Sequence: Synthetic Peptide
  SITE (7)..(7): Xaa is A, C, D, F, G, H, K, L, N, P, Q, R, T, V, W, or Y
FGNSIRXI

SEQ ID NO: 951 - protein, 8 aa, Artificial Sequence
  Description of Artificial Sequence: Synthetic Peptide
  SITE (7)..(7): Xaa is C, D, E, F, H, K, M, N, P, Q, T, V, or Y
FGNSLRXI

SEQ ID NO: 952 - protein, 8 aa, Artificial Sequence
  Description of Artificial Sequence: Synthetic Peptide
  SITE (7)..(7): Xaa is A, C, D, G, I, K, M, P, Q, R, T, W, or Y
FGNSIRXL

SEQ ID NO: 953 - protein, 8 aa, Artificial Sequence
  Description of Artificial Sequence: Synthetic Peptide
  SITE (7)..(7): Xaa is D, L, M, N, P, W, or Y
FGNSLRXL

SEQ ID NO: 954 - protein, 8 aa, Artificial Sequence
  Description of Artificial Sequence: Synthetic Peptide
  SITE (7)..(7): Xaa is C, D, F, H, K, L, M, P, R, V, or W
FGNSISXI

SEQ ID NO: 955 - protein, 8 aa, Artificial Sequence
  Description of Artificial Sequence: Synthetic Peptide
  SITE (7)..(7): Xaa is C, E, H, K, M, P, R, V, W, or Y
FGNSLSXI

SEQ ID NO: 956 - protein, 8 aa, Artificial Sequence
  Description of Artificial Sequence: Synthetic Peptide
  SITE (7)..(7): Xaa is C, G, H, K, V, or W
FGNSISXL

SEQ ID NO: 957 - protein, 8 aa, Artificial Sequence
  Description of Artificial Sequence: Synthetic Peptide
  SITE (7)..(7): Xaa is A, D, E, F, K, M, W, or Y
FGNSLSXL

SEQ ID NO: 958 - protein, 8 aa, Artificial Sequence
  Description of Artificial Sequence: Synthetic Peptide
  SITE (7)..(7): Xaa is A, C, D, E, F, G, H, I, L, M, N, Q, V, W, or Y
FGSDIDXI

SEQ ID NO: 959 - protein, 8 aa, Artificial Sequence
  Description of Artificial Sequence: Synthetic Peptide
  SITE (7)..(7): Xaa is C, D, H, M, N, V, W, or Y
FGSDLDXI

SEQ ID NO: 960 - protein, 8 aa, Artificial Sequence
  Description of Artificial Sequence: Synthetic Peptide
  SITE (7)..(7): Xaa is A, D, F, G, H, K, L, M, N, Q, S, or W
FGSDIDXL

SEQ ID NO: 961 - protein, 8 aa, Artificial Sequence
  Description of Artificial Sequence: Synthetic Peptide
  SITE (7)..(7): Xaa is C, H, M, or W
FGSDLDXL

SEQ ID NO: 962 - protein, 8 aa, Artificial Sequence
  Description of Artificial Sequence: Synthetic Peptide
  SITE (7)..(7): Xaa is A, C, D, E, F, I, K, L, M, N, P, Q, R, S, T, V, W, or Y
FGSDIRXI

SEQ ID NO: 963 - protein, 8 aa, Artificial Sequence
  Description of Artificial Sequence: Synthetic Peptide
  SITE (7)..(7): Xaa is C, D, E, F, G, H, I, K, M, N, P, Q, S, T, V, or Y
FGSDLRXI

SEQ ID NO: 964 - protein, 8 aa, Artificial Sequence
  Description of Artificial Sequence: Synthetic Peptide
  SITE (7)..(7): Xaa is A, C, D, F, H, M, P, R, T, V, W, or Y
FGSDIRXL

SEQ ID NO: 965 - protein, 8 aa, Artificial Sequence
  Description of Artificial Sequence: Synthetic Peptide
  SITE (7)..(7): Xaa is G, K, N, P, Q, or W
FGSDLRXL

SEQ ID NO: 966 - protein, 8 aa, Artificial Sequence
  Description of Artificial Sequence: Synthetic Peptide
  SITE (7)..(7): Xaa is C, D, F, H, M, N, Q, R, V, W, or Y
FGSDISXI

SEQ ID NO: 967 - protein, 8 aa, Artificial Sequence
  Description of Artificial Sequence: Synthetic Peptide
  SITE (7)..(7): Xaa is A, C, E, F, H, I, T, W, or Y
FGSDLSXI

SEQ ID NO: 968 - protein, 8 aa, Artificial Sequence
  Description of Artificial Sequence: Synthetic Peptide
  SITE (7)..(7): Xaa is C, D, F, H, M, N, Q, R, V, W, or Y
FGSDISXL

SEQ ID NO: 969 - protein, 8 aa, Artificial Sequence
  Description of Artificial Sequence: Synthetic Peptide
  SITE (7)..(7): Xaa is C, M, Q, or V
FGSDLSXL

SEQ ID NO: 970 - protein, 8 aa, Artificial Sequence
  Description of Artificial Sequence: Synthetic Peptide
  SITE (7)..(7): Xaa is C, D, E, F, H, K, L, N, P, Q, T, V, W, or Y
FGSEIDXI

SEQ ID NO: 971 - protein, 8 aa, Artificial Sequence
  Description of Artificial Sequence: Synthetic Peptide
  SITE (7)..(7): Xaa is C, F, H, I, L, M, R, S, T, W, or Y
FGSELDXI

SEQ ID NO: 972 - protein, 8 aa, Artificial Sequence
  Description of Artificial Sequence: Synthetic Peptide
  SITE (7)..(7): Xaa is E, H, I, K, M, N, P, Q, T, W, or Y
FGSEIDXL

SEQ ID NO: 973 - protein, 8 aa, Artificial Sequence
  Description of Artificial Sequence: Synthetic Peptide
  SITE (7)..(7): Xaa is C, K, L, N, P, Q, V, W, or Y
FGSELDXL

SEQ ID NO: 974 - protein, 8 aa, Artificial Sequence
  Description of Artificial Sequence: Synthetic Peptide
  SITE (7)..(7): Xaa is F, G, H, I, K, L, M, Q, R, S, T, V, W, or Y
FGSEIRXI

SEQ ID NO: 975 - protein, 8 aa, Artificial Sequence
  Description of Artificial Sequence: Synthetic Peptide
  SITE (7)..(7): Xaa is A, C, D, E, F, G, H, I, L, M, N, P, Q, R, S, T, V, W, or Y
FGSELRXI

SEQ ID NO: 976 - protein, 8 aa, Artificial Sequence
  Description of Artificial Sequence: Synthetic Peptide
  SITE (7)..(7): Xaa is C, G, H, I, K, M, P, R, W, or Y
FGSEIRXL

SEQ ID NO: 977 - protein, 8 aa, Artificial Sequence
  Description of Artificial Sequence: Synthetic Peptide
  SITE (7)..(7): Xaa is C, H, M, P, V, W, or Y
FGSELRXL

SEQ ID NO: 978 - protein, 8 aa, Artificial Sequence
  Description of Artificial Sequence: Synthetic Peptide
  SITE (7)..(7): Xaa is C, G, H, I, K, L, M, N, P, Q, R, T, or W
FGSEISXI

SEQ ID NO: 979 - protein, 8 aa, Artificial Sequence
  Description of Artificial Sequence: Synthetic Peptide
  SITE (7)..(7): Xaa is C, F, M, Q, R, V, W, or Y
FGSELSXI

SEQ ID NO: 980 - protein, 8 aa, Artificial Sequence
  Description of Artificial Sequence: Synthetic Peptide
  SITE (7)..(7): Xaa is A, D, G, H, I, L, M, P, Q, T, or Y
FGSEISXL

SEQ ID NO: 981 - protein, 8 aa, Artificial Sequence
  Description of Artificial Sequence: Synthetic Peptide
  SITE (7)..(7): Xaa is C, E, H, K, M, N, Q, S, W, or Y
FGSELSXL

SEQ ID NO: 982 - protein, 8 aa, Artificial Sequence
  Description of Artificial Sequence: Synthetic Peptide
  SITE (7)..(7): Xaa is C, D, E, F, G, H, K, M, P, R, S, T, W, or Y
FGSNIDXI

SEQ ID NO: 983 - protein, 8 aa, Artificial Sequence
  Description of Artificial Sequence: Synthetic Peptide
  SITE (7)..(7): Xaa is A, C, D, F, G, H, I, L, M, N, P, Q, R, T, V, W or Y
FGSNLDXI

SEQ ID NO: 984 - protein, 8 aa, Artificial Sequence
  Description of Artificial Sequence: Synthetic Peptide
  SITE (7)..(7): Xaa is C, D, E, F, G, H, K, M, N, P, S, W, or Y
FGSNIDXL

SEQ ID NO: 985 - protein, 8 aa, Artificial Sequence
  Description of Artificial Sequence: Synthetic Peptide
  SITE (7)..(7): Xaa is A, C, E, F, H, I, M, N, P, Q, W, or Y
FGSNLDXL

SEQ ID NO: 986 - protein, 8 aa, Artificial Sequence
  Description of Artificial Sequence: Synthetic Peptide
  SITE (7)..(7): Xaa is A, C, D, E, G, H, K, L, M, P, Q, R, T, V, W, or Y
FGSNIRXI

SEQ ID NO: 987 - protein, 8 aa, Artificial Sequence
  Description of Artificial Sequence: Synthetic Peptide
  SITE (7)..(7): Xaa is C, E, F, H, K, M, N, P, Q, S, V, or W
FGSNLRXI

SEQ ID NO: 988 - protein, 8 aa, Artificial Sequence
  Description of Artificial Sequence: Synthetic Peptide
  SITE (7)..(7): Xaa is C, D, G, H, I, M, N, P, S, or W
FGSNIRXL

SEQ ID NO: 989 - protein, 8 aa, Artificial Sequence
  Description of Artificial Sequence: Synthetic Peptide
  SITE (7)..(7): Xaa is C, H, L, M, P, Q, R, S, W, or Y
FGSNLRXL

SEQ ID NO: 990 - protein, 8 aa, Artificial Sequence
  Description of Artificial Sequence: Synthetic Peptide
  SITE (7)..(7): Xaa is C, E, G, M, P, Q, R, S, T, or Y
FGSNISXI

SEQ ID NO: 991 - protein, 8 aa, Artificial Sequence
  Description of Artificial Sequence: Synthetic Peptide
  SITE (7)..(7): Xaa is D, F, N, P, Q, R, or V
FGSNLSXI

SEQ ID NO: 992 - protein, 8 aa, Artificial Sequence
  Description of Artificial Sequence: Synthetic Peptide
  SITE (7)..(7): Xaa is C, G, I, M, N, P, Q, R, S, or W
FGSNISXL

SEQ ID NO: 993 - protein, 8 aa, Artificial Sequence
  Description of Artificial Sequence: Synthetic Peptide
  SITE (7)..(7): Xaa is C, F, G, L, M, or T
FGSNLSXL

SEQ ID NO: 994 - protein, 8 aa, Artificial Sequence
  Description of Artificial Sequence: Synthetic Peptide
  SITE (7)..(7): Xaa is A, C, D, F, G, H, K, L, M, N, P, Q, R, S, T, V, W, or Y
FGSQIDXI

SEQ ID NO: 995 - protein, 8 aa, Artificial Sequence
  Description of Artificial Sequence: Synthetic Peptide
  SITE (7)..(7): Xaa is C, D, E, G, H, I, K, L, M, P, Q, S, V, W, or Y
FGSQLDXI

SEQ ID NO: 996 - protein, 8 aa, Artificial Sequence
  Description of Artificial Sequence: Synthetic Peptide
  SITE (7)..(7): Xaa is C, D, F, G, H, N, P, Q, W, or Y
FGSQIDXL

SEQ ID NO: 997 - protein, 8 aa, Artificial Sequence
  Description of Artificial Sequence: Synthetic Peptide
  SITE (7)..(7): Xaa is A, C, E, F, G, H, I, K, M, N, P, R, S, T, W, or Y
FGSQLDXL

SEQ ID NO: 998 - protein, 8 aa, Artificial Sequence
  Description of Artificial Sequence: Synthetic Peptide
  SITE (7)..(7): Xaa is C, D, E, F, H, K, L, M, N, P, Q, R, S, T, V, W, or Y
FGSQIRXI

SEQ ID NO: 999 - protein, 8 aa, Artificial Sequence
  Description of Artificial Sequence: Synthetic Peptide
  SITE (7)..(7): Xaa is A, C, D, E, G, H, I, K, M, N, P, Q, R, S, T, W, or Y
FGSQLRXI

SEQ ID NO: 1000 - protein, 8 aa, Artificial Sequence
  Description of Artificial Sequence: Synthetic Peptide
  SITE (7)..(7): Xaa is C, F, H, M, N, P, Q, R, or W
FGSQIRXL

SEQ ID NO: 1001 - protein, 8 aa, Artificial Sequence
  Description of Artificial Sequence: Synthetic Peptide
  SITE (7)..(7): Xaa is C, D, E, H, K, L, M, N, P, Q, S, W, or Y
FGSQLRXL

SEQ ID NO: 1002 - protein, 8 aa, Artificial Sequence
  Description of Artificial Sequence: Synthetic Peptide
  SITE (7)..(7): Xaa is C, D, F, H, I, L, N, P, Q, T, V, W, or Y
FGSQISXI

SEQ ID NO: 1003 - protein, 8 aa, Artificial Sequence
  Description of Artificial Sequence: Synthetic Peptide
  SITE (7)..(7): Xaa is C, F, H, I, M, N, P, R, S, V, W, or Y
FGSQLSXI

SEQ ID NO: 1004 - protein, 8 aa, Artificial Sequence
  Description of Artificial Sequence: Synthetic Peptide
  SITE (7)..(7): Xaa is C, E, F, G, H, I, K, N, P, Q, R, S, V, or Y
FGSQISXL

SEQ ID NO: 1005 - protein, 8 aa, Artificial Sequence
  Description of Artificial Sequence: Synthetic Peptide
  SITE (7)..(7): Xaa is E, F, H, I, K, M, P, V, W, or Y
FGSQLSXL

SEQ ID NO: 1006 - protein, 8 aa, Artificial Sequence
  Description of Artificial Sequence: Synthetic Peptide
  SITE (7)..(7): Xaa is C, D, E, F, G, H, L, M, P, Q, S, T, V, W, or Y
FGSSIDXI

SEQ ID NO: 1007 - protein, 8 aa, Artificial Sequence
  Description of Artificial Sequence: Synthetic Peptide
  SITE (7)..(7): Xaa is C, F, G H, I, K, M, P, or W
FGSSLDXI

SEQ ID NO: 1008 - protein, 8 aa, Artificial Sequence
  Description of Artificial Sequence: Synthetic Peptide
  SITE (7)..(7): Xaa is A, C, D, F, H, N, P, S, T V, or Y
FGSSIDXL

SEQ ID NO: 1009 - protein, 8 aa, Artificial Sequence
  Description of Artificial Sequence: Synthetic Peptide
  SITE (7)..(7): Xaa is C, E, G, H, M, P, Q, W, or Y
FGSSLDXL

SEQ ID NO: 1010 - protein, 8 aa, Artificial Sequence
  Description of Artificial Sequence: Synthetic Peptide
  SITE (7)..(7): Xaa is A, C, G, H, I, K, P, R, W, or Y
FGSSIRXI

SEQ ID NO: 1011 - protein, 8 aa, Artificial Sequence
  Description of Artificial Sequence: Synthetic Peptide
  SITE (7)..(7): Xaa is C, D, F, H, L, M, N, Q, W, or Y
FGSSLRXI

SEQ ID NO: 1012 - protein, 8 aa, Artificial Sequence
  Description of Artificial Sequence: Synthetic Peptide
  SITE (7)..(7): Xaa is A, C, D, F, G, H, I, K, L, T, or V
FGSSIRXL

SEQ ID NO: 1013 - protein, 8 aa, Artificial Sequence
  Description of Artificial Sequence: Synthetic Peptide
  SITE (7)..(7): Xaa is C, D, E, H, M, N, Q, W, or Y
FGSSLRXL

SEQ ID NO: 1014 - protein, 8 aa, Artificial Sequence
  Description of Artificial Sequence: Synthetic Peptide
  SITE (7)..(7): Xaa is A, H, K, M, P, Q, or Y
FGSSISXI

SEQ ID NO: 1015 - protein, 8 aa, Artificial Sequence
  Description of Artificial Sequence: Synthetic Peptide
  SITE (7)..(7): Xaa is A, E, H, P, T, or V
FGSSLSXI

SEQ ID NO: 1016 - protein, 8 aa, Artificial Sequence
  Description of Artificial Sequence: Synthetic Peptide
  SITE (7)..(7): Xaa is C, F, G, P, R, W, or Y
FGSSISXL

SEQ ID NO: 1017 - protein, 8 aa, Artificial Sequence
  Description of Artificial Sequence: Synthetic Peptide
  SITE (7)..(7): Xaa is D, N, or W
FGSSLSXL

SEQ ID NO: 1018 - protein, 8 aa, Artificial Sequence
  Description of Artificial Sequence: Synthetic Peptide
  SITE (7)..(7): Xaa is C, D, F, G, H, I, L, M, N, P, Q, T, V, or W
FKADIDXI

SEQ ID NO: 1019 - protein, 8 aa, Artificial Sequence
  Description of Artificial Sequence: Synthetic Peptide
  SITE (7)..(7): Xaa is C, D, F, K, M, N, P, Q, R, W, or Y
FKADLDXI

SEQ ID NO: 1020 - protein, 8 aa, Artificial Sequence
  Description of Artificial Sequence: Synthetic Peptide
  SITE (7)..(7): Xaa is A, C, G, H, I, M, S, T, V, or W
FKADIDXL

SEQ ID NO: 1021 - protein, 8 aa, Artificial Sequence
  Description of Artificial Sequence: Synthetic Peptide
  SITE (7)..(7): Xaa is C, D, E, H, L, M, Q, W, or Y
FKADLDXL

SEQ ID NO: 1022 - protein, 8 aa, Artificial Sequence
  Description of Artificial Sequence: Synthetic Peptide
  SITE (7)..(7): Xaa is C, E, F, G, I, L, M, P, Q, T, V, or W
FKADIRXI

SEQ ID NO: 1023 - protein, 8 aa, Artificial Sequence
  Description of Artificial Sequence: Synthetic Peptide
  SITE (7)..(7): Xaa is A, C, E, F, G, I, K, L, M, Q, S, T, W, or Y
FKADLRXI

SEQ ID NO: 1024 - protein, 8 aa, Artificial Sequence
  Description of Artificial Sequence: Synthetic Peptide
  SITE (7)..(7): Xaa is C, D, F, H, Q, V, or W
FKADIRXL

SEQ ID NO: 1025 - protein, 8 aa, Artificial Sequence
  Description of Artificial Sequence: Synthetic Peptide
  SITE (7)..(7): Xaa is C, F, I, M, N, Q, T, V, W, or Y
FKADLRXL

SEQ ID NO: 1026 - protein, 8 aa, Artificial Sequence
  Description of Artificial Sequence: Synthetic Peptide
  SITE (7)..(7): Xaa is C, E, I, K, M, P, R, T, W, or Y
FKADISXI

SEQ ID NO: 1027 - protein, 8 aa, Artificial Sequence
  Description of Artificial Sequence: Synthetic Peptide
  SITE (7)..(7): Xaa is C, D, F, M, P, R, W, or Y
FKADLSXI

SEQ ID NO: 1028 - protein, 8 aa, Artificial Sequence
  Description of Artificial Sequence: Synthetic Peptide
  SITE (7)..(7): Xaa is C, F, H, M, P, S, T, V, or W
FKADISXL

SEQ ID NO: 1029 - protein, 8 aa, Artificial Sequence
  Description of Artificial Sequence: Synthetic Peptide
  SITE (7)..(7): Xaa is I, M, or W
FKADLSXL

SEQ ID NO: 1030 - protein, 8 aa, Artificial Sequence
  Description of Artificial Sequence: Synthetic Peptide
  SITE (7)..(7): Xaa is A, C, D, F, H, I, M, Q, R, T, V, W, or Y
FKAEIDXI

SEQ ID NO: 1031 - protein, 8 aa, Artificial Sequence
  Description of Artificial Sequence: Synthetic Peptide
  SITE (7)..(7): Xaa is C, F, H, M, N, P, V, W, or Y
FKAELDXI

SEQ ID NO: 1032 - protein, 8 aa, Artificial Sequence
  Description of Artificial Sequence: Synthetic Peptide
  SITE (7)..(7): Xaa is D, I, or W
FKAEIDXL

SEQ ID NO: 1033 - protein, 8 aa, Artificial Sequence
  Description of Artificial Sequence: Synthetic Peptide
  SITE (7)..(7): Xaa is C, F, P, W, or Y
FKAELDXL

SEQ ID NO: 1034 - protein, 8 aa, Artificial Sequence
  Description of Artificial Sequence: Synthetic Peptide
  SITE (7)..(7): Xaa is A, C, D, E, F, G, H, I, L, M, N, P, Q, T, V, W, or Y
FKAEIRXI

SEQ ID NO: 1035 - protein, 8 aa, Artificial Sequence
  Description of Artificial Sequence: Synthetic Peptide
  SITE (7)..(7): Xaa is A, C, F, H, I, K, L, M, N, Q, S, T, V, W, or Y
FKAELRXI

SEQ ID NO: 1036 - protein, 8 aa, Artificial Sequence
  Description of Artificial Sequence: Synthetic Peptide
  SITE (7)..(7): Xaa is C, F, I, L, M, R, V, or W
FKAEIRXL

SEQ ID NO: 1037 - protein, 8 aa, Artificial Sequence
  Description of Artificial Sequence: Synthetic Peptide
  SITE (7)..(7): Xaa is C, D, F, I, K, M, N, P, V, W, or Y
FKAELRXL

SEQ ID NO: 1038 - protein, 8 aa, Artificial Sequence
  Description of Artificial Sequence: Synthetic Peptide
  SITE (7)..(7): Xaa is A, C, D, F, H, I, K, L, M, Q, R, T, or W
FKAEISXI

SEQ ID NO: 1039 - protein, 8 aa, Artificial Sequence
  Description of Artificial Sequence: Synthetic Peptide
  SITE (7)..(7): Xaa is C, D, E, I, M, N, P, R, S, T, W, or Y
FKAEISXL

SEQ ID NO: 1040 - protein, 8 aa, Artificial Sequence
  Description of Artificial Sequence: Synthetic Peptide
  SITE (7)..(7): Xaa is C, F, G, H, I, M, N, Q, T, V, W, or Y
FKAELSXL

SEQ ID NO: 1041 - protein, 8 aa, Artificial Sequence
  Description of Artificial Sequence: Synthetic Peptide
  SITE (7)..(7): Xaa is C, E, F, H, I, K, L, P, Q, T, V, W, or Y
FKANIDXI

SEQ ID NO: 1042 - protein, 8 aa, Artificial Sequence
  Description of Artificial Sequence: Synthetic Peptide
  SITE (7)..(7): Xaa is C, E, G, I, L, M, N, P, Q, R, S, V, W, or Y
FKANLDXI

SEQ ID NO: 1043 - protein, 8 aa, Artificial Sequence
  Description of Artificial Sequence: Synthetic Peptide
  SITE (7)..(7): Xaa is A, C, E, F, G, L, N, Q, S, W, or Y
FKANIDXL

SEQ ID NO: 1044 - protein, 8 aa, Artificial Sequence
  Description of Artificial Sequence: Synthetic Peptide
  SITE (7)..(7): Xaa is C, D, F, G, K, L, M, P, Q, S, T, V, W, or Y
FKANLDXL

SEQ ID NO: 1045 - protein, 8 aa, Artificial Sequence
  Description of Artificial Sequence: Synthetic Peptide
  SITE (7)..(7): Xaa is C, F, G, I, L, M, Q, R, T, W, or Y
FKANIRXI

SEQ ID NO: 1046 - protein, 8 aa, Artificial Sequence
  Description of Artificial Sequence: Synthetic Peptide
  SITE (7)..(7): Xaa is A, F, G, H, L, M, N, Q, S, T, W, or Y
FKANLRXI

SEQ ID NO: 1047 - protein, 8 aa, Artificial Sequence
  Description of Artificial Sequence: Synthetic Peptide
  SITE (7)..(7): Xaa is C, D, E, F, G, H, I, K, L, M, N, P, Q, S, T, V, or W
FKANIRXL

SEQ ID NO: 1048 - protein, 8 aa, Artificial Sequence
  Description of Artificial Sequence: Synthetic Peptide
  SITE (7)..(7): Xaa is C, D, E, F, H, K, M, P, Q, V, W, or Y
FKANLRXL

SEQ ID NO: 1049 - protein, 8 aa, Artificial Sequence
  Description of Artificial Sequence: Synthetic Peptide
  SITE (7)..(7): Xaa is A, C, D, E, F, H, I, L, P, Q, W, or Y
FKANISXI

SEQ ID NO: 1050 - protein, 8 aa, Artificial Sequence
  Description of Artificial Sequence: Synthetic Peptide
  SITE (7)..(7): Xaa is C, D, G, H, K, L, M, N, P, Q. T. or W
FKANLSXI

SEQ ID NO: 1051 - protein, 8 aa, Artificial Sequence
  Description of Artificial Sequence: Synthetic Peptide
  SITE (7)..(7): Xaa is A, C, D, E, F, G, H, K, M, N, S, T, or W
FKANISXL

SEQ ID NO: 1052 - protein, 8 aa, Artificial Sequence
  Description of Artificial Sequence: Synthetic Peptide
  SITE (7)..(7): Xaa is C, E, F, I, M, N, P, S, T, V, or W
FKANLSXL

SEQ ID NO: 1053 - protein, 8 aa, Artificial Sequence
  Description of Artificial Sequence: Synthetic Peptide
  SITE (7)..(7): Xaa is C, E, F, G, H, I, M, P, Q, R, S, V, or Y
FKAQIDXI

SEQ ID NO: 1054 - protein, 8 aa, Artificial Sequence
  Description of Artificial Sequence: Synthetic Peptide
  SITE (7)..(7): Xaa is C, H, I, L, M, N, P, S, T, V, W, or Y
FKAQLDXI

SEQ ID NO: 1055 - protein, 8 aa, Artificial Sequence
  Description of Artificial Sequence: Synthetic Peptide
  SITE (7)..(7): Xaa is C, D, F, G, H, I, K, L, M, Q, W, or Y
FKAQIDXL

SEQ ID NO: 1056 - protein, 8 aa, Artificial Sequence
  Description of Artificial Sequence: Synthetic Peptide
  SITE (7)..(7): Xaa is C, F, H, M, N, or P
FKAQLDXL

SEQ ID NO: 1057 - protein, 8 aa, Artificial Sequence
  Description of Artificial Sequence: Synthetic Peptide
  SITE (7)..(7): Xaa is C, D, E, F, H, I, K, L, M, N, P, Q, R, T, V, W, or Y
FKAQIRXI

SEQ ID NO: 1058 - protein, 8 aa, Artificial Sequence
  Description of Artificial Sequence: Synthetic Peptide
  SITE (7)..(7): Xaa is C, D, G, H, I, K, L, M, N, P, R, V, W, or Y
FKAQLRXI

SEQ ID NO: 1059 - protein, 8 aa, Artificial Sequence
  Description of Artificial Sequence: Synthetic Peptide
  SITE (7)..(7): Xaa is C, D, E, F, G, H, I, K, P, Q, R, S, T, V, W, or Y
FKAQIRXL

SEQ ID NO: 1060 - protein, 8 aa, Artificial Sequence
  Description of Artificial Sequence: Synthetic Peptide
  SITE (7)..(7): Xaa is C, D, F, G, H, N, P, Q, T, V, or W
FKAQLRXL

SEQ ID NO: 1061 - protein, 8 aa, Artificial Sequence
  Description of Artificial Sequence: Synthetic Peptide
  SITE (7)..(7): Xaa is C, D, E, G, H, K, L, P, Q, R, T, or Y
FKAQISXI

SEQ ID NO: 1062 - protein, 8 aa, Artificial Sequence
  Description of Artificial Sequence: Synthetic Peptide
  SITE (7)..(7): Xaa is A, C, E, F, I, K, M, P, Q, R, V, W, or Y
FKAQLSXI

SEQ ID NO: 1063 - protein, 8 aa, Artificial Sequence
  Description of Artificial Sequence: Synthetic Peptide
  SITE (7)..(7): Xaa is C, D, E, F ,G ,H, I, L, M, N, P, Q, T, V, W, or Y
FKAQISXL

SEQ ID NO: 1064 - protein, 8 aa, Artificial Sequence
  Description of Artificial Sequence: Synthetic Peptide
  SITE (7)..(7): Xaa is D, F, G, I, M, P, S, V, or W
FKAQLSXL

SEQ ID NO: 1065 - protein, 8 aa, Artificial Sequence
  Description of Artificial Sequence: Synthetic Peptide
  SITE (7)..(7): Xaa is C, F, H, M ,N, Q, S, T, or W
FKASIDXI

SEQ ID NO: 1066 - protein, 8 aa, Artificial Sequence
  Description of Artificial Sequence: Synthetic Peptide
  SITE (7)..(7): Xaa is C, F, G, H, M, N, Q, R, W, or Y
FKASLDXI

SEQ ID NO: 1067 - protein, 8 aa, Artificial Sequence
  Description of Artificial Sequence: Synthetic Peptide
  SITE (7)..(7): Xaa is C, F, H, I, M, N, P, or T
FKASIDXL

SEQ ID NO: 1068 - protein, 8 aa, Artificial Sequence
  Description of Artificial Sequence: Synthetic Peptide
  SITE (7)..(7): Xaa is C, F, M, N, Q, V, W, or Y
FKASLDXL

SEQ ID NO: 1069 - protein, 8 aa, Artificial Sequence
  Description of Artificial Sequence: Synthetic Peptide
  SITE (7)..(7): Xaa is A, C, D, E, F, G, H, I, L, M, N, Q, S, T, V, W, or Y
FKASIRXI

SEQ ID NO: 1070 - protein, 8 aa, Artificial Sequence
  Description of Artificial Sequence: Synthetic Peptide
  SITE (7)..(7): Xaa is C, D, E, F, H, I, Q, S, V, or Y
FKASLRXI

SEQ ID NO: 1071 - protein, 8 aa, Artificial Sequence
  Description of Artificial Sequence: Synthetic Peptide
  SITE (7)..(7): Xaa is C, D, E, H, I, K, L, M, P, Q, R, T, V ,W, or Y
FKASIRXL

SEQ ID NO: 1072 - protein, 8 aa, Artificial Sequence
  Description of Artificial Sequence: Synthetic Peptide
  SITE (7)..(7): Xaa is A, C, F, G, H, I, K, L, M, P, Q, S, T, V, W, or Y
FKASLRXL

SEQ ID NO: 1073 - protein, 8 aa, Artificial Sequence
  Description of Artificial Sequence: Synthetic Peptide
  SITE (7)..(7): Xaa is C, E, G, I, L, N, Q, R, T, V, W, or Y
FKASISXI

SEQ ID NO: 1074 - protein, 8 aa, Artificial Sequence
  Description of Artificial Sequence: Synthetic Peptide
  SITE (7)..(7): Xaa is C, E, H, M, P, Q, T, V, or W
FKASLSXI

SEQ ID NO: 1075 - protein, 8 aa, Artificial Sequence
  Description of Artificial Sequence: Synthetic Peptide
  SITE (7)..(7): Xaa is A, C, D, G, F, H, I, K, M, P, Q, R, T, or W
FKASISXL

SEQ ID NO: 1076 - protein, 8 aa, Artificial Sequence
  Description of Artificial Sequence: Synthetic Peptide
  SITE (7)..(7): Xaa is A, F, G, H, K, N, Q, S, T, or Y
FKASLSXL

SEQ ID NO: 1077 - protein, 8 aa, Artificial Sequence
  Description of Artificial Sequence: Synthetic Peptide
  SITE (7)..(7): Xaa is A, C, F, H, I, K, M, N, P, S, T, W, or Y
FKGDIDXI

SEQ ID NO: 1078 - protein, 8 aa, Artificial Sequence
  Description of Artificial Sequence: Synthetic Peptide
  SITE (7)..(7): Xaa is A, C, E, F, G, H, N, P, R, T, V, or Y
FKGDLDXI

SEQ ID NO: 1079 - protein, 8 aa, Artificial Sequence
  Description of Artificial Sequence: Synthetic Peptide
  SITE (7)..(7): Xaa is A, C, E, G, H, K, M, P, V, or W
FKGDIDXL

SEQ ID NO: 1080 - protein, 8 aa, Artificial Sequence
  Description of Artificial Sequence: Synthetic Peptide
  SITE (7)..(7): Xaa is C, D, H, I, L, M, P, V, or W
FKGDLDXL

SEQ ID NO: 1081 - protein, 8 aa, Artificial Sequence
  Description of Artificial Sequence: Synthetic Peptide
  SITE (7)..(7): Xaa is A, C, D, F, G, H, I, L, M, N, P, Q, R, T, V, W, or Y
FKGDIRXI

SEQ ID NO: 1082 - protein, 8 aa, Artificial Sequence
  Description of Artificial Sequence: Synthetic Peptide
  SITE (7)..(7): Xaa is A, C, D, F, H, I, K, L, M, P, Q, T, W, or Y
FKGDLRXI

SEQ ID NO: 1083 - protein, 8 aa, Artificial Sequence
  Description of Artificial Sequence: Synthetic Peptide
  SITE (7)..(7): Xaa is C, D, E, F, G, I, L, M, P, Q, S, T, W, or Y
FKGDIRXL

SEQ ID NO: 1084 - protein, 8 aa, Artificial Sequence
  Description of Artificial Sequence: Synthetic Peptide
  SITE (7)..(7): Xaa is C, I, K, L, P, Q, S, T, V, W, or Y
FKGDLRXL

SEQ ID NO: 1085 - protein, 8 aa, Artificial Sequence
  Description of Artificial Sequence: Synthetic Peptide
  SITE (7)..(7): Xaa is C, H, M, W, or Y
FKGDISXI

SEQ ID NO: 1086 - protein, 8 aa, Artificial Sequence
  Description of Artificial Sequence: Synthetic Peptide
  SITE (7)..(7): Xaa is A, C, D, N, P, Q, R, S, T, W, or Y
FKGDLSXI

SEQ ID NO: 1087 - protein, 8 aa, Artificial Sequence
  Description of Artificial Sequence: Synthetic Peptide
  SITE (7)..(7): Xaa is C, F, G, H, I, M, N, P, R, S, T, V, or W
FKGDISXL

SEQ ID NO: 1088 - protein, 8 aa, Artificial Sequence
  Description of Artificial Sequence: Synthetic Peptide
  SITE (7)..(7): Xaa is C, H, L, M, P, S, or W
FKGDLSXL

SEQ ID NO: 1089 - protein, 8 aa, Artificial Sequence
  Description of Artificial Sequence: Synthetic Peptide
  SITE (7)..(7): Xaa is A, C, D, E, G, H, I, K, L, M, P, R, S, T, W, or Y
FKGEIDXI

SEQ ID NO: 1090 - protein, 8 aa, Artificial Sequence
  Description of Artificial Sequence: Synthetic Peptide
  SITE (7)..(7): Xaa is A, C, D, E, F, H, M, P, Q, R, W, or Y
FKGELDXI

SEQ ID NO: 1091 - protein, 8 aa, Artificial Sequence
  Description of Artificial Sequence: Synthetic Peptide
  SITE (7)..(7): Xaa is C, D, F, H, P, Q, S, T, W,or Y
FKGEIDXL

SEQ ID NO: 1092 - protein, 8 aa, Artificial Sequence
  Description of Artificial Sequence: Synthetic Peptide
  SITE (7)..(7): Xaa is C, H, L, M, N, Q, V, W, or Y
FKGELDXL

SEQ ID NO: 1093 - protein, 8 aa, Artificial Sequence
  Description of Artificial Sequence: Synthetic Peptide
  SITE (7)..(7): Xaa is C, D, F, G, H, M, Q, W, or Y
FKGEIRXI

SEQ ID NO: 1094 - protein, 8 aa, Artificial Sequence
  Description of Artificial Sequence: Synthetic Peptide
  SITE (7)..(7): Xaa is C, D, I, M, N, P, Q, R, S, T, V, or W
FKGELRXI

SEQ ID NO: 1095 - protein, 8 aa, Artificial Sequence
  Description of Artificial Sequence: Synthetic Peptide
  SITE (7)..(7): Xaa is A, C, D, F, G, H, M, T, W, or Y
FKGEIRXL

SEQ ID NO: 1096 - protein, 8 aa, Artificial Sequence
  Description of Artificial Sequence: Synthetic Peptide
  SITE (7)..(7): Xaa is C, E, F, G, H, I, L, M, N, P, V, W, or Y
FKGELRXL

SEQ ID NO: 1097 - protein, 8 aa, Artificial Sequence
  Description of Artificial Sequence: Synthetic Peptide
  SITE (7)..(7): Xaa is C, D, E, H, K, M, P, and W
FKGEISXI

SEQ ID NO: 1098 - protein, 8 aa, Artificial Sequence
  Description of Artificial Sequence: Synthetic Peptide
  SITE (7)..(7): Xaa is A, C, F, G, H, I, K, L, M, P, R, S, T, V, and W
FKGELSXI

SEQ ID NO: 1099 - protein, 8 aa, Artificial Sequence
  Description of Artificial Sequence: Synthetic Peptide
  SITE (7)..(7): Xaa is C, F, G, I, M, N, Q, R, T, and Y
FKGEISXL

SEQ ID NO: 1100 - protein, 8 aa, Artificial Sequence
  Description of Artificial Sequence: Synthetic Peptide
  SITE (7)..(7): Xaa is C, G, H, K, M, N, P, T, V, W, and Y
FKGELSXL

SEQ ID NO: 1101 - protein, 8 aa, Artificial Sequence
  Description of Artificial Sequence: Synthetic Peptide
  SITE (7)..(7): Xaa is C, D, F, H, K, M, N, R, S, T, V, W, or Y
FKGNIDXI

SEQ ID NO: 1102 - protein, 8 aa, Artificial Sequence
  Description of Artificial Sequence: Synthetic Peptide
  SITE (7)..(7): Xaa is D, F, H, K, M, N, R, S, T, V, W, or Y
FKGNIDXI

SEQ ID NO: 1103 - protein, 8 aa, Artificial Sequence
  Description of Artificial Sequence: Synthetic Peptide
  SITE (7)..(7): Xaa is E, F, G, K, N, P, Q, R, S, T, or W
FKGNLDXI

SEQ ID NO: 1104 - protein, 8 aa, Artificial Sequence
  Description of Artificial Sequence: Synthetic Peptide
  SITE (7)..(7): Xaa is A, C, G, H, K, L, M, P, Q, R, S, V, or W
FKGNIDXL

SEQ ID NO: 1105 - protein, 8 aa, Artificial Sequence
  Description of Artificial Sequence: Synthetic Peptide
  SITE (7)..(7): Xaa is C, F, H, K, M, N, P, Q, S, V, or W
FKGNLDXL

SEQ ID NO: 1106 - protein, 8 aa, Artificial Sequence
  Description of Artificial Sequence: Synthetic Peptide
  SITE (7)..(7): Xaa is A, C, D, F, G, K, L, M, N, P, Q, R, or W
FKGNIRXI

SEQ ID NO: 1107 - protein, 8 aa, Artificial Sequence
  Description of Artificial Sequence: Synthetic Peptide
  SITE (7)..(7): Xaa is A, C, D, E, F, H, K, M, N, P, Q, R, S, T, W, or Y
FKGNLRXI

SEQ ID NO: 1108 - protein, 8 aa, Artificial Sequence
  Description of Artificial Sequence: Synthetic Peptide
  SITE (7)..(7): Xaa is A, C, F, G, H, K, L, M, N, P, W, or Y
FKGNIRXL

SEQ ID NO: 1109 - protein, 8 aa, Artificial Sequence
  Description of Artificial Sequence: Synthetic Peptide
  SITE (7)..(7): Xaa is A, C, F, G, H, I, K, L, M, P, Q, R, S, T, V, W, or Y
FKGNLRXL

SEQ ID NO: 1110 - protein, 8 aa, Artificial Sequence
  Description of Artificial Sequence: Synthetic Peptide
  SITE (7)..(7): Xaa is A, C, D, E, H, L, M, N, P, S, V, W, or Y
FKGNISXI

SEQ ID NO: 1111 - protein, 8 aa, Artificial Sequence
  Description of Artificial Sequence: Synthetic Peptide
  SITE (7)..(7): Xaa is C, D, F, I, K, M, P, Q, S, T, W, or Y
FKGNLSXI

SEQ ID NO: 1112 - protein, 8 aa, Artificial Sequence
  Description of Artificial Sequence: Synthetic Peptide
  SITE (7)..(7): Xaa is C, H, P, S, or W
FKGNISXL

SEQ ID NO: 1113 - protein, 8 aa, Artificial Sequence
  Description of Artificial Sequence: Synthetic Peptide
  SITE (7)..(7): Xaa is E, F, G, H, I, M, Q, S, T, or W
FKGNLSXL

SEQ ID NO: 1114 - protein, 8 aa, Artificial Sequence
  Description of Artificial Sequence: Synthetic Peptide
  SITE (7)..(7): Xaa is A, C, F, G, H, I, K, L, M, P, Q, R, T, W, or Y
FKGQIDXI

SEQ ID NO: 1115 - protein, 8 aa, Artificial Sequence
  Description of Artificial Sequence: Synthetic Peptide
  SITE (7)..(7): Xaa is A, C, D, E, F, H, I, K, L, N, Q, R, S, V, W, or Y
FKGQLDXI

SEQ ID NO: 1116 - protein, 8 aa, Artificial Sequence
  Description of Artificial Sequence: Synthetic Peptide
  SITE (7)..(7): Xaa is A, C, D, E, H, K, M, N, P, S, W, or Y
FKGQIDXL

SEQ ID NO: 1117 - protein, 8 aa, Artificial Sequence
  Description of Artificial Sequence: Synthetic Peptide
  SITE (7)..(7): Xaa is C, D, F, H, K, N, R, S, T, V, W, or Y
FKGQLDXL

SEQ ID NO: 1118 - protein, 8 aa, Artificial Sequence
  Description of Artificial Sequence: Synthetic Peptide
  SITE (7)..(7): Xaa is A, C, F, G, H, I, K, L, M, P, Q, R, T, W, or Y
FKGQIRXI

SEQ ID NO: 1119 - protein, 8 aa, Artificial Sequence
  Description of Artificial Sequence: Synthetic Peptide
  SITE (7)..(7): Xaa is A, D, E, F, I, K, M, N, P, R, T, W, or Y
FKGQLRXI

SEQ ID NO: 1120 - protein, 8 aa, Artificial Sequence
  Description of Artificial Sequence: Synthetic Peptide
  SITE (7)..(7): Xaa is A, C, D, E, F, G, H, I, K, M, P, Q, S, T, V, W, or Y
FKGQIRXL

SEQ ID NO: 1121 - protein, 8 aa, Artificial Sequence
  Description of Artificial Sequence: Synthetic Peptide
  SITE (7)..(7): Xaa is C, F, G, I, K, L, M, N, P, Q, R, S, T, V, W, or Y
FKGQLRXL

SEQ ID NO: 1122 - protein, 8 aa, Artificial Sequence
  Description of Artificial Sequence: Synthetic Peptide
  SITE (7)..(7): Xaa is A, C, D, E, F, H, I, K, M, P, Q, R, S, T, W, or Y
FKGQISXI

SEQ ID NO: 1123 - protein, 8 aa, Artificial Sequence
  Description of Artificial Sequence: Synthetic Peptide
  SITE (7)..(7): Xaa is A, C, E, F, G, H, I, L, N, P, T, V, W, or Y
FKGQLSXI

SEQ ID NO: 1124 - protein, 8 aa, Artificial Sequence
  Description of Artificial Sequence: Synthetic Peptide
  SITE (7)..(7): Xaa is A, C, D, E, G, H, I, K, L, M, N, P, Q, R, V, W, or Y
FKGQISXL

SEQ ID NO: 1125 - protein, 8 aa, Artificial Sequence
  Description of Artificial Sequence: Synthetic Peptide
  SITE (7)..(7): Xaa is C, G, H, K, L, M, N, P, R, or W
FKGQLSXL

SEQ ID NO: 1126 - protein, 8 aa, Artificial Sequence
  Description of Artificial Sequence: Synthetic Peptide
  SITE (7)..(7): Xaa is A, C, G, M, N, P, T, V, or W
FKGSIDXI

SEQ ID NO: 1127 - protein, 8 aa, Artificial Sequence
  Description of Artificial Sequence: Synthetic Peptide
  SITE (7)..(7): Xaa is A, G, H, M, N, P, R, S, T, V, or W
FKGSLDXI

SEQ ID NO: 1128 - protein, 8 aa, Artificial Sequence
  Description of Artificial Sequence: Synthetic Peptide
  SITE (7)..(7): Xaa is C, G, H, L, M, N, P, Q, R, S, T, V, or W
FKGSIDXL

SEQ ID NO: 1129 - protein, 8 aa, Artificial Sequence
  Description of Artificial Sequence: Synthetic Peptide
  SITE (7)..(7): Xaa is C, H, M, N, Q, T, or W
FKGSLDXL

SEQ ID NO: 1130 - protein, 8 aa, Artificial Sequence
  Description of Artificial Sequence: Synthetic Peptide
  SITE (7)..(7): Xaa is A, C, E, F, G, H, I, K, L, N, Q, R, S, T, V, W, or Y
FKGSIRXI

SEQ ID NO: 1131 - protein, 8 aa, Artificial Sequence
  Description of Artificial Sequence: Synthetic Peptide
  SITE (7)..(7): Xaa is A, C, D, F, H, K, L, M, N, P, R, V, W, or Y
FKGSLRXI

SEQ ID NO: 1132 - protein, 8 aa, Artificial Sequence
  Description of Artificial Sequence: Synthetic Peptide
  SITE (7)..(7): Xaa is A, D, E, F, G, H, K, L, M, N, P, Q, R, T, V, W, or Y
FKGSIRXL

SEQ ID NO: 1133 - protein, 8 aa, Artificial Sequence
  Description of Artificial Sequence: Synthetic Peptide
  SITE (7)..(7): Xaa is E, F, I, L, M, N, P, Q, T, or W
FKGSLRXL

SEQ ID NO: 1134 - protein, 8 aa, Artificial Sequence
  Description of Artificial Sequence: Synthetic Peptide
  SITE (7)..(7): Xaa is A, C, G, M, N, P, T, V, or W
FKGSISXI

SEQ ID NO: 1135 - protein, 8 aa, Artificial Sequence
  Description of Artificial Sequence: Synthetic Peptide
  SITE (7)..(7): Xaa is C, D, H, I, K, L, P, Q, R, or W
FKGSLSXI

SEQ ID NO: 1136 - protein, 8 aa, Artificial Sequence
  Description of Artificial Sequence: Synthetic Peptide
  SITE (7)..(7): Xaa is A, D, F, G, H, K, L, M, N, P, Q, R, T, V, W, or Y
FKGSISXL

SEQ ID NO: 1137 - protein, 8 aa, Artificial Sequence
  Description of Artificial Sequence: Synthetic Peptide
  SITE (7)..(7): Xaa is C, H, V, W, or Y
FKGSLSXL

SEQ ID NO: 1138 - protein, 8 aa, Artificial Sequence
  Description of Artificial Sequence: Synthetic Peptide
  SITE (7)..(7): Xaa is A, C, H, L, M, N, P, Q, R, S, V, or W
FKLDIDXI

SEQ ID NO: 1139 - protein, 8 aa, Artificial Sequence
  Description of Artificial Sequence: Synthetic Peptide
  SITE (7)..(7): Xaa is A, C, D, F, G, H, I, M, N, P, Q, R, T, V, W, or Y
FKLDLDXI

SEQ ID NO: 1140 - protein, 8 aa, Artificial Sequence
  Description of Artificial Sequence: Synthetic Peptide
  SITE (7)..(7): Xaa is A, C, F, H, I, L, M, P, Q, T, V, or W
FKLDIDXL

SEQ ID NO: 1141 - protein, 8 aa, Artificial Sequence
  Description of Artificial Sequence: Synthetic Peptide
  SITE (7)..(7): Xaa is D, F, G, M, P, T, W, or Y
FKLDLDXL

SEQ ID NO: 1142 - protein, 8 aa, Artificial Sequence
  Description of Artificial Sequence: Synthetic Peptide
  SITE (7)..(7): Xaa is A, D, C, F, G, H, I, K, L, M, P, Q, R, S, T, V, or Y
FKLDIRXI

SEQ ID NO: 1143 - protein, 8 aa, Artificial Sequence
  Description of Artificial Sequence: Synthetic Peptide
  SITE (7)..(7): Xaa is C, D, G, H, L, M, N, P, Q, S, T, V, W, or Y
FKLDLRXI

SEQ ID NO: 1144 - protein, 8 aa, Artificial Sequence
  Description of Artificial Sequence: Synthetic Peptide
  SITE (7)..(7): Xaa is C, E, G, H, I, L, M, P, Q, R, S, T, V, W, or Y
FKLDIRXL

SEQ ID NO: 1145 - protein, 8 aa, Artificial Sequence
  Description of Artificial Sequence: Synthetic Peptide
  SITE (7)..(7): Xaa is C, D, F, G, K, L, Q, R, V, W, or Y
FKLDLRXL

SEQ ID NO: 1146 - protein, 8 aa, Artificial Sequence
  Description of Artificial Sequence: Synthetic Peptide
  SITE (7)..(7): Xaa is C, E, F, G, H, I, M, Q, R, S, V, W, or Y
FKLDISXI

SEQ ID NO: 1147 - protein, 8 aa, Artificial Sequence
  Description of Artificial Sequence: Synthetic Peptide
  SITE (7)..(7): Xaa is C, F, H, N , or W
FKLDLSXI

SEQ ID NO: 1148 - protein, 8 aa, Artificial Sequence
  Description of Artificial Sequence: Synthetic Peptide
  SITE (7)..(7): Xaa is C, D, F, G, M, N, P, R, W, or Y
FKLDISXL

SEQ ID NO: 1149 - protein, 8 aa, Artificial Sequence
  Description of Artificial Sequence: Synthetic Peptide
  SITE (7)..(7): Xaa is C, E, L, or M
FKLDLSXL

SEQ ID NO: 1150 - protein, 8 aa, Artificial Sequence
  Description of Artificial Sequence: Synthetic Peptide
  SITE (7)..(7): Xaa is C, D, E, F, G, H, L, M, P, R, T, or V
FKLEIDXI

SEQ ID NO: 1151 - protein, 8 aa, Artificial Sequence
  Description of Artificial Sequence: Synthetic Peptide
  SITE (7)..(7): Xaa is A, C, E, F, H, L, M, N, P, T, V, W, or Y
FKLELDXI

SEQ ID NO: 1152 - protein, 8 aa, Artificial Sequence
  Description of Artificial Sequence: Synthetic Peptide
  SITE (7)..(7): Xaa is A, C, H, I, K, L, M, N, Q, T, V, W, or Y
FKLEIDXL

SEQ ID NO: 1153 - protein, 8 aa, Artificial Sequence
  Description of Artificial Sequence: Synthetic Peptide
  SITE (7)..(7): Xaa is A, C, E, G, I, L, Q, S, V, or W
FKLELDXL

SEQ ID NO: 1154 - protein, 8 aa, Artificial Sequence
  Description of Artificial Sequence: Synthetic Peptide
  SITE (7)..(7): Xaa is A, C, E, G, H, I, M, N, P, Q, R, S, V, W, or Y
FKLEIRXI

SEQ ID NO: 1155 - protein, 8 aa, Artificial Sequence
  Description of Artificial Sequence: Synthetic Peptide
  SITE (7)..(7): Xaa is A, C, D, E, F, G, H, I, K, L, M, N, P, Q, R, S, T, V, W, or Y
FKLELRXI

SEQ ID NO: 1156 - protein, 8 aa, Artificial Sequence
  Description of Artificial Sequence: Synthetic Peptide
  SITE (7)..(7): Xaa is C, E, F, H, I, K, L, M, N, P, Q, R, S, V, or W
FKLEIRXL

SEQ ID NO: 1157 - protein, 8 aa, Artificial Sequence
  Description of Artificial Sequence: Synthetic Peptide
  SITE (7)..(7): Xaa is A, C, D, E, F, G, H, L, M, N, P, Q, V, W, or Y
FKLELRXL

SEQ ID NO: 1158 - protein, 8 aa, Artificial Sequence
  Description of Artificial Sequence: Synthetic Peptide
  SITE (7)..(7): Xaa is A, F, G, M, V, W, or Y
FKLEISXI

SEQ ID NO: 1159 - protein, 8 aa, Artificial Sequence
  Description of Artificial Sequence: Synthetic Peptide
  SITE (7)..(7): Xaa is F, H, I, M, N, R, S, W, or Y
FKLELSXI

SEQ ID NO: 1160 - protein, 8 aa, Artificial Sequence
  Description of Artificial Sequence: Synthetic Peptide
  SITE (7)..(7): Xaa is A, C, F, H, I, M, N, Q, R, V, W, or Y
FKLEISXL

SEQ ID NO: 1161 - protein, 8 aa, Artificial Sequence
  Description of Artificial Sequence: Synthetic Peptide
  SITE (7)..(7): Xaa is I, K, M, N, or Y
FKLELSXL

SEQ ID NO: 1162 - protein, 8 aa, Artificial Sequence
  Description of Artificial Sequence: Synthetic Peptide
  SITE (7)..(7): Xaa is C, D, E, F, G, H, K, L, Q, T, V, W, or Y
FKLNIDXI

SEQ ID NO: 1163 - protein, 8 aa, Artificial Sequence
  Description of Artificial Sequence: Synthetic Peptide
  SITE (7)..(7): Xaa is A, E, G, H, L, M, N, P, Q, R, S, T, V, W, or Y
FKLNLDXI

SEQ ID NO: 1164 - protein, 8 aa, Artificial Sequence
  Description of Artificial Sequence: Synthetic Peptide
  SITE (7)..(7): Xaa is A, C, H, I, M, N, P, R, S, T, V, W, or Y
FKLNIDXL

SEQ ID NO: 1165 - protein, 8 aa, Artificial Sequence
  Description of Artificial Sequence: Synthetic Peptide
  SITE (7)..(7): Xaa is A, C, D, E, G, H, M, N, P, R, W or Y
FKLNLDXL

SEQ ID NO: 1166 - protein, 8 aa, Artificial Sequence
  Description of Artificial Sequence: Synthetic Peptide
  SITE (7)..(7): Xaa is A, C, D, E, F, G, H, I, K, L, M, S, T, V, W, or Y
FKLNIRXI

SEQ ID NO: 1167 - protein, 8 aa, Artificial Sequence
  Description of Artificial Sequence: Synthetic Peptide
  SITE (7)..(7): Xaa is A, C, E, F, G, H, K, L, M, Q, S, T, V, W, or Y
FKLNLRXI

SEQ ID NO: 1168 - protein, 8 aa, Artificial Sequence
  Description of Artificial Sequence: Synthetic Peptide
  SITE (7)..(7): Xaa is C, E, F, G, H, K, M, N, P, Q, R, S, T, V, W, or Y
FKLNIRXL

SEQ ID NO: 1169 - protein, 8 aa, Artificial Sequence
  Description of Artificial Sequence: Synthetic Peptide
  SITE (7)..(7): Xaa is A, C, D, E, F, G, I, L, Q, R, S, T, W, or Y
FKLNLRXL

SEQ ID NO: 1170 - protein, 8 aa, Artificial Sequence
  Description of Artificial Sequence: Synthetic Peptide
  SITE (7)..(7): Xaa is A, C, F ,H, I, M, R, S, T, W, or Y
FKLNISXI

SEQ ID NO: 1171 - protein, 8 aa, Artificial Sequence
  Description of Artificial Sequence: Synthetic Peptide
  SITE (7)..(7): Xaa is A, C, D, F, I, M, R, T, V ,W, or Y
FKLNLSXI

SEQ ID NO: 1172 - protein, 8 aa, Artificial Sequence
  Description of Artificial Sequence: Synthetic Peptide
  SITE (7)..(7): Xaa is A, C, D, E, F, H, K, M, R, S, or W
FKLNISXL

SEQ ID NO: 1173 - protein, 8 aa, Artificial Sequence
  Description of Artificial Sequence: Synthetic Peptide
  SITE (7)..(7): Xaa is A, C, D, H, L, N, P, R, V, W, or Y
FKLNLSXL

SEQ ID NO: 1174 - protein, 8 aa, Artificial Sequence
  Description of Artificial Sequence: Synthetic Peptide
  SITE (7)..(7): Xaa is A, C, E, F, G, H, I, K, L, M, N, P, Q, R, S, T, V, W, or Y
FKLQIDXI

SEQ ID NO: 1175 - protein, 8 aa, Artificial Sequence
  Description of Artificial Sequence: Synthetic Peptide
  SITE (7)..(7): Xaa is A, C, D, E, F, H, K, M, N, P, Q, R, S, T, V, W, or Y
FKLQLDXI

SEQ ID NO: 1176 - protein, 8 aa, Artificial Sequence
  Description of Artificial Sequence: Synthetic Peptide
  SITE (7)..(7): Xaa is C, D, F, H, I, L, N, P, R, T, V, W, or Y
FKLQIDXL

SEQ ID NO: 1177 - protein, 8 aa, Artificial Sequence
  Description of Artificial Sequence: Synthetic Peptide
  SITE (7)..(7): Xaa is A, C, D, G, H, I, K, M, P, Q, S, V, W, or Y
FKLQLDXL

SEQ ID NO: 1178 - protein, 8 aa, Artificial Sequence
  Description of Artificial Sequence: Synthetic Peptide
  SITE (7)..(7): Xaa is C, D, E, F, G, H, I, K, L, M, P, Q, R, S, T, V, W, or Y
FKLQIRXI

SEQ ID NO: 1179 - protein, 8 aa, Artificial Sequence
  Description of Artificial Sequence: Synthetic Peptide
  SITE (7)..(7): Xaa is A, C, D, E, F, G, H, I, K, L, M, N, P, Q, R, T, V, W, or Y
FKLQLRXI

SEQ ID NO: 1180 - protein, 8 aa, Artificial Sequence
  Description of Artificial Sequence: Synthetic Peptide
  SITE (7)..(7): Xaa is A, C, D, E, F, G, H, I, L, M, N, P, Q, S, T, V, W, or Y
FKLQIRXL

SEQ ID NO: 1181 - protein, 8 aa, Artificial Sequence
  Description of Artificial Sequence: Synthetic Peptide
  SITE (7)..(7): Xaa is C, F, G ,H ,I ,L, M, N, Q, R, S, V, W, or Y
FKLQLRXL

SEQ ID NO: 1182 - protein, 8 aa, Artificial Sequence
  Description of Artificial Sequence: Synthetic Peptide
  SITE (7)..(7): Xaa is C, D, E, G, H, I, K, L, M, N, P, Q, R, S, T, V, or W
FKLQISXI

SEQ ID NO: 1183 - protein, 8 aa, Artificial Sequence
  Description of Artificial Sequence: Synthetic Peptide
  SITE (7)..(7): Xaa is C, E, G, H, K, N, P, Q, R, S, T, V, W, or Y
FKLQLSXI

SEQ ID NO: 1184 - protein, 8 aa, Artificial Sequence
  Description of Artificial Sequence: Synthetic Peptide
  SITE (7)..(7): Xaa is A, C, E, G, H, K, L, M, P, Q, R, S, T, V, W, or Y
FKLQISXL

SEQ ID NO: 1185 - protein, 8 aa, Artificial Sequence
  Description of Artificial Sequence: Synthetic Peptide
  SITE (7)..(7): Xaa is A, C, D, E, F, G, H, K, M, N, P, R, or T
FKLQLSXL

SEQ ID NO: 1186 - protein, 8 aa, Artificial Sequence
  Description of Artificial Sequence: Synthetic Peptide
  SITE (7)..(7): Xaa is A, C, F, H, I, L, S, T, V, W, or Y
FKLSIDXI

SEQ ID NO: 1187 - protein, 8 aa, Artificial Sequence
  Description of Artificial Sequence: Synthetic Peptide
  SITE (7)..(7): Xaa is C, F, G, I, L, M, N, R, S, T, W, or Y
FKLSLDXI

SEQ ID NO: 1188 - protein, 8 aa, Artificial Sequence
  Description of Artificial Sequence: Synthetic Peptide
  SITE (7)..(7): Xaa is A, C, E, H, M, N, P, R, S, T, V, W, or Y
FKLSIDXL

SEQ ID NO: 1189 - protein, 8 aa, Artificial Sequence
  Description of Artificial Sequence: Synthetic Peptide
  SITE (7)..(7): Xaa is C, D, F, G, I, K, M, V, W, or Y
FKLSLDXL

SEQ ID NO: 1190 - protein, 8 aa, Artificial Sequence
  Description of Artificial Sequence: Synthetic Peptide
  SITE (7)..(7): Xaa is A, C, D, E, F, G, H, I, L, M, N, P, Q, S, T, V, W, or Y
FKLSIRXI

SEQ ID NO: 1191 - protein, 8 aa, Artificial Sequence
  Description of Artificial Sequence: Synthetic Peptide
  SITE (7)..(7): Xaa is C, E, F, G, H, I, K, L, M, Q, R, S, T, V, or W
FKLSLRXI

SEQ ID NO: 1192 - protein, 8 aa, Artificial Sequence
  Description of Artificial Sequence: Synthetic Peptide
  SITE (7)..(7): Xaa is C, M, R, or V
FKLSIRXL

SEQ ID NO: 1193 - protein, 8 aa, Artificial Sequence
  Description of Artificial Sequence: Synthetic Peptide
  SITE (7)..(7): Xaa is C, I, K, M, N, P, R, V, or W
FKLSLRXL

SEQ ID NO: 1194 - protein, 8 aa, Artificial Sequence
  Description of Artificial Sequence: Synthetic Peptide
  SITE (7)..(7): Xaa is C, F, G, H, M, R, S, T, or W
FKLSISXI

SEQ ID NO: 1195 - protein, 8 aa, Artificial Sequence
  Description of Artificial Sequence: Synthetic Peptide
  SITE (7)..(7): Xaa is C, E, F, H, L, Q, R, or W
FKLSLSXI

SEQ ID NO: 1196 - protein, 8 aa, Artificial Sequence
  Description of Artificial Sequence: Synthetic Peptide
  SITE (7)..(7): Xaa is C, E, H, I, N, V, W, or Y
FKLSISXL

SEQ ID NO: 1197 - protein, 8 aa, Artificial Sequence
  Description of Artificial Sequence: Synthetic Peptide
  SITE (7)..(7): Xaa is C, F, H, M, N, Q, V, or W
FKLSLSXL

SEQ ID NO: 1198 - protein, 8 aa, Artificial Sequence
  Description of Artificial Sequence: Synthetic Peptide
  SITE (7)..(7): Xaa is A, C, E, F, G, H, I, K, M, R, S, W, or Y
FKNDIDXI

SEQ ID NO: 1199 - protein, 8 aa, Artificial Sequence
  Description of Artificial Sequence: Synthetic Peptide
  SITE (7)..(7): Xaa is A, C, F, G, H, I, M, N, P, Q, R, S, T, V, W, or Y
FKNDLDXI

SEQ ID NO: 1200 - protein, 8 aa, Artificial Sequence
  Description of Artificial Sequence: Synthetic Peptide
  SITE (7)..(7): Xaa is C, F, H, K, M, S, W, or Y
FKNDIDXL

SEQ ID NO: 1201 - protein, 7 aa, Artificial Sequence
  Description of Artificial Sequence: Synthetic Peptide
  SITE (7)..(7): Xaa is C, F, L, M, W, or Y
FKNDLDL

SEQ ID NO: 1202 - protein, 8 aa, Artificial Sequence
  Description of Artificial Sequence: Synthetic Peptide
  SITE (7)..(7): Xaa is A, C, E, G, H, K, M, N, P, Q, R, S, T, W, or Y
FKNDIRXI

SEQ ID NO: 1203 - protein, 8 aa, Artificial Sequence
  Description of Artificial Sequence: Synthetic Peptide
  SITE (7)..(7): Xaa is A, C, D, E, F, G, H, I,K, L, N, Q, R, S, V, W, or Y
FKNDLRXI

SEQ ID NO: 1204 - protein, 8 aa, Artificial Sequence
  Description of Artificial Sequence: Synthetic Peptide
  SITE (7)..(7): Xaa is A, C, D, F, G, H, K, L, M, N, P, Q, R, S, T, W, or Y
FKNDIRDL

SEQ ID NO: 1205 - protein, 8 aa, Artificial Sequence
  Description of Artificial Sequence: Synthetic Peptide
  SITE (7)..(7): Xaa is C, D, F, H, K, M, N, Q, R, S, T, W, or Y
FKNDLRXL

SEQ ID NO: 1206 - protein, 8 aa, Artificial Sequence
  Description of Artificial Sequence: Synthetic Peptide
  SITE (7)..(7): Xaa is A, C, F, I, K, M, N, Q, R, S, T, V, W, or Y
FKNDISXI

SEQ ID NO: 1207 - protein, 8 aa, Artificial Sequence
  Description of Artificial Sequence: Synthetic Peptide
  SITE (7)..(7): Xaa is A, C, D, E, G, H, L, N, P, R, W, or Y
FKNDLSXI

SEQ ID NO: 1208 - protein, 8 aa, Artificial Sequence
  Description of Artificial Sequence: Synthetic Peptide
  SITE (7)..(7): Xaa is A, C, D, F, G, I, L, M, N, P, R, T, V, W, or Y
FKNDISXL

SEQ ID NO: 1209 - protein, 8 aa, Artificial Sequence
  Description of Artificial Sequence: Synthetic Peptide
  SITE (7)..(7): Xaa is C, E ,H ,I, K, M, N, T, V, W, or Y
FKNDLSXL

SEQ ID NO: 1210 - protein, 8 aa, Artificial Sequence
  Description of Artificial Sequence: Synthetic Peptide
  SITE (7)..(7): Xaa is C, D, F, G, H, M, Q, T, W, or Y
FKNEIDXI

SEQ ID NO: 1211 - protein, 8 aa, Artificial Sequence
  Description of Artificial Sequence: Synthetic Peptide
  SITE (7)..(7): Xaa is A, G, H, I, K, L, P, Q, S, T, V, or W
FKNELDXI

SEQ ID NO: 1212 - protein, 8 aa, Artificial Sequence
  Description of Artificial Sequence: Synthetic Peptide
  SITE (7)..(7): Xaa is C, E, G, M, P, Q, S ,W, or Y
FKNEIDXL

SEQ ID NO: 1213 - protein, 8 aa, Artificial Sequence
  Description of Artificial Sequence: Synthetic Peptide
  SITE (7)..(7): Xaa is C, F, H, I, M, P, R, W, or Y
FKNELDXL

SEQ ID NO: 1214 - protein, 8 aa, Artificial Sequence
  Description of Artificial Sequence: Synthetic Peptide
  SITE (7)..(7): Xaa is A, C, D, F, G, H, K, M, N, P, Q, T, V, or W
FKNELRXI

SEQ ID NO: 1215 - protein, 8 aa, Artificial Sequence
  Description of Artificial Sequence: Synthetic Peptide
  SITE (7)..(7): Xaa is A, C, D, F, G, H, I, K, M, P, S, T, V, W, or Y
FKNEIRXL

SEQ ID NO: 1216 - protein, 8 aa, Artificial Sequence
  Description of Artificial Sequence: Synthetic Peptide
  SITE (7)..(7): Xaa is C, D, G, H, M, P, Q, S, W, or Y
FKNELRXL

SEQ ID NO: 1217 - protein, 8 aa, Artificial Sequence
  Description of Artificial Sequence: Synthetic Peptide
  SITE (7)..(7): Xaa is C, D, F, G, H, I, L, M, N, Q, R, W, or Y
FKNEISXI

SEQ ID NO: 1218 - protein, 8 aa, Artificial Sequence
  Description of Artificial Sequence: Synthetic Peptide
  SITE (7)..(7): Xaa is A, C, G, H, M, N, P, Q, R, T, W, or Y
FKNELSXI

SEQ ID NO: 1219 - protein, 8 aa, Artificial Sequence
  Description of Artificial Sequence: Synthetic Peptide
  SITE (7)..(7): Xaa is A, C, F ,M, W, or Y
FKNEISXL

SEQ ID NO: 1220 - protein, 8 aa, Artificial Sequence
  Description of Artificial Sequence: Synthetic Peptide
  SITE (7)..(7): Xaa is F, G, H, R, W, or Y
FKNELSXL

SEQ ID NO: 1221 - protein, 8 aa, Artificial Sequence
  Description of Artificial Sequence: Synthetic Peptide
  SITE (7)..(7): Xaa is A, C, G, H, N, P, R, or W
FKNNIDXI

SEQ ID NO: 1222 - protein, 8 aa, Artificial Sequence
  Description of Artificial Sequence: Synthetic Peptide
  SITE (7)..(7): Xaa is C, D, E, F, G, N, P, S, T, V, or W
FKNNLDXI

SEQ ID NO: 1223 - protein, 8 aa, Artificial Sequence
  Description of Artificial Sequence: Synthetic Peptide
  SITE (7)..(7): Xaa is C, D, G, H, I, M, P, Q, R, T, W, or Y
FKNNIDXL

SEQ ID NO: 1224 - protein, 8 aa, Artificial Sequence
  Description of Artificial Sequence: Synthetic Peptide
  SITE (7)..(7): Xaa is C, D, E, F, G, H, I, L, M, R, or W
FKNNLDXL

SEQ ID NO: 1225 - protein, 8 aa, Artificial Sequence
  Description of Artificial Sequence: Synthetic Peptide
  SITE (7)..(7): Xaa is C, E, G, H, I, L, M, Q, T, or W
FKNNIRXI

SEQ ID NO: 1226 - protein, 8 aa, Artificial Sequence
  Description of Artificial Sequence: Synthetic Peptide
  SITE (7)..(7): Xaa is A, C, E, H, L, N, S, T, V, or W
FKNNLRXI

SEQ ID NO: 1227 - protein, 8 aa, Artificial Sequence
  Description of Artificial Sequence: Synthetic Peptide
  SITE (7)..(7): Xaa is C, D, F, G, I, K, M, P, Q, R, S, T, W, or Y
FKNNIRXL

SEQ ID NO: 1228 - protein, 8 aa, Artificial Sequence
  Description of Artificial Sequence: Synthetic Peptide
  SITE (7)..(7): Xaa is C, F, G, H, K, M, P, Q, R, V, W, or Y
FKNNLRXL

SEQ ID NO: 1229 - protein, 8 aa, Artificial Sequence
  Description of Artificial Sequence: Synthetic Peptide
  SITE (7)..(7): Xaa is A, D, I, M, Q, S, or W
FKNNISXI

SEQ ID NO: 1230 - protein, 8 aa, Artificial Sequence
  Description of Artificial Sequence: Synthetic Peptide
  SITE (7)..(7): Xaa is A, C, F, G, I, M, P, R, V, W, or Y
FKNNLSXI

SEQ ID NO: 1231 - protein, 8 aa, Artificial Sequence
  Description of Artificial Sequence: Synthetic Peptide
  SITE (7)..(7): Xaa is C, F, G, H, M, P, Q, S, T, or W
FKNNISXL

SEQ ID NO: 1232 - protein, 8 aa, Artificial Sequence
  Description of Artificial Sequence: Synthetic Peptide
  SITE (7)..(7): Xaa is C, F, G, H, L, M, P, T, W, or Y
FKNNLSXL

SEQ ID NO: 1233 - protein, 8 aa, Artificial Sequence
  Description of Artificial Sequence: Synthetic Peptide
  SITE (7)..(7): Xaa is A, C, D, E, G, H, I, L, M, N, P, Q, R, S, V, or Y
FKNQIDXI

SEQ ID NO: 1234 - protein, 8 aa, Artificial Sequence
  Description of Artificial Sequence: Synthetic Peptide
  SITE (7)..(7): Xaa is C, E, F, G, I, L, N, P, Q, or Y
FKNQLDXI

SEQ ID NO: 1235 - protein, 8 aa, Artificial Sequence
  Description of Artificial Sequence: Synthetic Peptide
  SITE (7)..(7): Xaa is C, F, G, H, K, N, P, R, S, or T
FKNQIDXL

SEQ ID NO: 1236 - protein, 8 aa, Artificial Sequence
  Description of Artificial Sequence: Synthetic Peptide
  SITE (7)..(7): Xaa is C, D, F, G, I, M, N, P, V, W, or Y
FKNQLDXL

SEQ ID NO: 1237 - protein, 8 aa, Artificial Sequence
  Description of Artificial Sequence: Synthetic Peptide
  SITE (7)..(7): Xaa is C, D, F, G, H, I, L, M, N, P, Q, R, S, T, V, W, or Y
FKNQIRXI

SEQ ID NO: 1238 - protein, 8 aa, Artificial Sequence
  Description of Artificial Sequence: Synthetic Peptide
  SITE (7)..(7): Xaa is A, C, D, E, F, G, H, K, M, P, R, T, V, W, or Y
FKNQLRXI

SEQ ID NO: 1239 - protein, 8 aa, Artificial Sequence
  Description of Artificial Sequence: Synthetic Peptide
  SITE (7)..(7): Xaa is C, D, F, G, H, I, M, N, P, Q, R, S, T, V ,W, or Y
FKNQIRXL

SEQ ID NO: 1240 - protein, 8 aa, Artificial Sequence
  Description of Artificial Sequence: Synthetic Peptide
  SITE (7)..(7): Xaa is C, F, G, H, I, K, L, M, P, R, S, W, or Y
FKNQLRXL

SEQ ID NO: 1241 - protein, 8 aa, Artificial Sequence
  Description of Artificial Sequence: Synthetic Peptide
  SITE (7)..(7): Xaa is A, C, F, G, H, I, L, M, N, P, Q, R, S, T, V, W, or Y
FKNQISXI

SEQ ID NO: 1242 - protein, 8 aa, Artificial Sequence
  Description of Artificial Sequence: Synthetic Peptide
  SITE (7)..(7): Xaa is A, E, F, G, K, L, N, P, Q, S, T, V, W, or Y
FKNQLSXI

SEQ ID NO: 1243 - protein, 8 aa, Artificial Sequence
  Description of Artificial Sequence: Synthetic Peptide
  SITE (7)..(7): Xaa is C, E, F, G, H, I, M, T, V, or Y
FKNQISXL

SEQ ID NO: 1244 - protein, 8 aa, Artificial Sequence
  Description of Artificial Sequence: Synthetic Peptide
  SITE (7)..(7): Xaa is A, M, P, R, or W
FKNQLSXL

SEQ ID NO: 1245 - protein, 8 aa, Artificial Sequence
  Description of Artificial Sequence: Synthetic Peptide
  SITE (7)..(7): Xaa is C, D, E, G, H, I, K, M, Q, R, S, T, or W
FKNSIDXI

SEQ ID NO: 1246 - protein, 8 aa, Artificial Sequence
  Description of Artificial Sequence: Synthetic Peptide
  SITE (7)..(7): Xaa is C, D, H, I, M, Q, R, or W
FKNSLDXI

SEQ ID NO: 1247 - protein, 8 aa, Artificial Sequence
  Description of Artificial Sequence: Synthetic Peptide
  SITE (7)..(7): Xaa is A, H, I, L, M, P, T, V, W, or Y
FKNSIDXL

SEQ ID NO: 1248 - protein, 8 aa, Artificial Sequence
  Description of Artificial Sequence: Synthetic Peptide
  SITE (7)..(7): Xaa is C, F, I, P, Q, R, or T
FKNSLDXL

SEQ ID NO: 1249 - protein, 8 aa, Artificial Sequence
  Description of Artificial Sequence: Synthetic Peptide
  SITE (7)..(7): Xaa is A, C, D, G, H, K, M, P, V, W, or Y
FKNSIRXI

SEQ ID NO: 1250 - protein, 8 aa, Artificial Sequence
  Description of Artificial Sequence: Synthetic Peptide
  SITE (7)..(7): Xaa is A, C, D, E, F, G, H, L, M, N, Q, R, T, V ,W, or Y
FKNSLRXI

SEQ ID NO: 1251 - protein, 8 aa, Artificial Sequence
  Description of Artificial Sequence: Synthetic Peptide
  SITE (7)..(7): Xaa is A, C, E, F, G, H, K, P, R, T, V, W, or Y
FKNSIRXL

SEQ ID NO: 1252 - protein, 8 aa, Artificial Sequence
  Description of Artificial Sequence: Synthetic Peptide
  SITE (7)..(7): Xaa is D, E, F, H, K, L, M, N, P, or W
FKNSLRXL

SEQ ID NO: 1253 - protein, 8 aa, Artificial Sequence
  Description of Artificial Sequence: Synthetic Peptide
  SITE (7)..(7): Xaa is C, F, G, H, L, M, P, R, V, W, or Y
FKNSISXI

SEQ ID NO: 1254 - protein, 8 aa, Artificial Sequence
  Description of Artificial Sequence: Synthetic Peptide
  SITE (7)..(7): Xaa is C, L, M, N, R, V, W, or Y
FKNSLSXI

SEQ ID NO: 1255 - protein, 8 aa, Artificial Sequence
  Description of Artificial Sequence: Synthetic Peptide
  SITE (7)..(7): Xaa is E, F, I, L, or W
FKNSISXL

SEQ ID NO: 1256 - protein, 8 aa, Artificial Sequence
  Description of Artificial Sequence: Synthetic Peptide
  SITE (7)..(7): Xaa is A, C, F, H, L, T, V, or Y
FKNSLSXL

SEQ ID NO: 1257 - protein, 8 aa, Artificial Sequence
  Description of Artificial Sequence: Synthetic Peptide
  SITE (7)..(7): Xaa is C, E, F, H, M, N, P, S, T, V, or W
FKSDIDXI

SEQ ID NO: 1258 - protein, 8 aa, Artificial Sequence
  Description of Artificial Sequence: Synthetic Peptide
  SITE (7)..(7): Xaa is A, C, D, E, F, G, H, I, M, P, S, T, V, W, or Y
FKSDLDXI

SEQ ID NO: 1259 - protein, 8 aa, Artificial Sequence
  Description of Artificial Sequence: Synthetic Peptide
  SITE (7)..(7): Xaa is A, I, K, L, M, W, or Y
FKSDIDXL

SEQ ID NO: 1260 - protein, 8 aa, Artificial Sequence
  Description of Artificial Sequence: Synthetic Peptide
  SITE (7)..(7): Xaa is C, E, F, G, K, L, M, N, Q, S, T, V, W, or Y
FKSDLDXL

SEQ ID NO: 1261 - protein, 8 aa, Artificial Sequence
  Description of Artificial Sequence: Synthetic Peptide
  SITE (7)..(7): Xaa is A, C, F, G, I, L, M, P, Q, R, S, T, V, W, or Y
FKSDIRXI

SEQ ID NO: 1262 - protein, 8 aa, Artificial Sequence
  Description of Artificial Sequence: Synthetic Peptide
  SITE (7)..(7): Xaa is C, D, G, H, I, K, L, M, N, P, Q, T, V, W, or Y
FKSDLRXI

SEQ ID NO: 1263 - protein, 8 aa, Artificial Sequence
  Description of Artificial Sequence: Synthetic Peptide
  SITE (7)..(7): Xaa is C, F, H, I, K, M, N, P, Q, S, V, W, or Y
FKSDIRXL

SEQ ID NO: 1264 - protein, 8 aa, Artificial Sequence
  Description of Artificial Sequence: Synthetic Peptide
  SITE (7)..(7): Xaa is A, C, D, E, F, G, H, I, K, M, P, Q, R, S, W, or Y
FKSDLRXL

SEQ ID NO: 1265 - protein, 8 aa, Artificial Sequence
  Description of Artificial Sequence: Synthetic Peptide
  SITE (7)..(7): Xaa is C, E, G, H, I, N, P, Q, R, T, V, W, or Y
FKSDISXI

SEQ ID NO: 1266 - protein, 8 aa, Artificial Sequence
  Description of Artificial Sequence: Synthetic Peptide
  SITE (7)..(7): Xaa is A, C, D, F, G, H, K, L, M, P, Q, V, W, or Y
FKSDLSXI

SEQ ID NO: 1267 - protein, 8 aa, Artificial Sequence
  Description of Artificial Sequence: Synthetic Peptide
  SITE (7)..(7): Xaa is A, C, D, E, F, H, K, L, N, P, Q, T, or W
FKSDISXL

SEQ ID NO: 1268 - protein, 8 aa, Artificial Sequence
  Description of Artificial Sequence: Synthetic Peptide
  SITE (7)..(7): Xaa is C, E, F, H, I, M, P, Q, R, T, W, or Y
FKSDLSXL

SEQ ID NO: 1269 - protein, 8 aa, Artificial Sequence
  Description of Artificial Sequence: Synthetic Peptide
  SITE (7)..(7): Xaa is C, D, E, F, H, I, K, M, N, P, R, S, V, or Y
FKSEIDXI

SEQ ID NO: 1270 - protein, 8 aa, Artificial Sequence
  Description of Artificial Sequence: Synthetic Peptide
  SITE (7)..(7): Xaa is C, H, M, V, W, or Y
FKSELDXI

SEQ ID NO: 1271 - protein, 8 aa, Artificial Sequence
  Description of Artificial Sequence: Synthetic Peptide
  SITE (7)..(7): Xaa is A, C, L, M, P, or W
FKSEIDXL

SEQ ID NO: 1272 - protein, 8 aa, Artificial Sequence
  Description of Artificial Sequence: Synthetic Peptide
  SITE (7)..(7): Xaa is C, D, M, P, Q, W, or Y
FKSELDXL

SEQ ID NO: 1273 - protein, 8 aa, Artificial Sequence
  Description of Artificial Sequence: Synthetic Peptide
  SITE (7)..(7): Xaa is A, C, D, E, F, H, I, K, L, M, N, P, Q, R, T, W, or Y
FKSEIRXI

SEQ ID NO: 1274 - protein, 8 aa, Artificial Sequence
  Description of Artificial Sequence: Synthetic Peptide
  SITE (7)..(7): Xaa is A, C, F, G, H, I, K, L, M, R, S, V, W, or Y
FKSELRXI

SEQ ID NO: 1275 - protein, 8 aa, Artificial Sequence
  Description of Artificial Sequence: Synthetic Peptide
  SITE (7)..(7): Xaa is C, D, F, G, H, I, K, M, P, Q, R, T, V, W, or Y
FKSEIRXL

SEQ ID NO: 1276 - protein, 8 aa, Artificial Sequence
  Description of Artificial Sequence: Synthetic Peptide
  SITE (7)..(7): Xaa is C, D, G, H, I, M, N, P, Q, V, W, or Y
FKSELRXL

SEQ ID NO: 1277 - protein, 8 aa, Artificial Sequence
  Description of Artificial Sequence: Synthetic Peptide
  SITE (7)..(7): Xaa is C, D, E, F, H, I, M, P, Q, R, T, V, W, or Y
FKSEISXI

SEQ ID NO: 1278 - protein, 8 aa, Artificial Sequence
  Description of Artificial Sequence: Synthetic Peptide
  SITE (7)..(7): Xaa is C, F, H, L, N, R, S, T, W, or Y
FKSELSXI

SEQ ID NO: 1279 - protein, 8 aa, Artificial Sequence
  Description of Artificial Sequence: Synthetic Peptide
  SITE (7)..(7): Xaa is A, C, D, E, F, G, I, L, M, R, W, or Y
FKSEISXL

SEQ ID NO: 1280 - protein, 8 aa, Artificial Sequence
  Description of Artificial Sequence: Synthetic Peptide
  SITE (7)..(7): Xaa is C, D, H, I, L, T, V, or W
FKSELSXL

SEQ ID NO: 1281 - protein, 8 aa, Artificial Sequence
  Description of Artificial Sequence: Synthetic Peptide
  SITE (7)..(7): Xaa is C, D, E, G, I, L, P, Q, R, S, V, W, or Y
FKSNIDXI

SEQ ID NO: 1282 - protein, 8 aa, Artificial Sequence
  Description of Artificial Sequence: Synthetic Peptide
  SITE (7)..(7): Xaa is A, C, D, E, F, G, H, I, K, M, N, P, Q, T, V, W, or Y
FKSNLDXI

SEQ ID NO: 1283 - protein, 8 aa, Artificial Sequence
  Description of Artificial Sequence: Synthetic Peptide
  SITE (7)..(7): Xaa is C, F, H, K, L, P, Q, T, or W
FKSNIDXL

SEQ ID NO: 1284 - protein, 8 aa, Artificial Sequence
  Description of Artificial Sequence: Synthetic Peptide
  SITE (7)..(7): Xaa is C, D, G, H, N, P, Q, R, S, T, V, W, or Y
FKSNLDXL

SEQ ID NO: 1285 - protein, 8 aa, Artificial Sequence
  Description of Artificial Sequence: Synthetic Peptide
  SITE (7)..(7): Xaa is C, E, F, G, K, L, M, N, Q, S, T, V, W, or Y
FKSNIRXI

SEQ ID NO: 1286 - protein, 8 aa, Artificial Sequence
  Description of Artificial Sequence: Synthetic Peptide
  SITE (7)..(7): Xaa is C, E, F, G, H, I, K, M, N, P, Q, R, S, T, V, or Y
FKSNLRXI

SEQ ID NO: 1287 - protein, 8 aa, Artificial Sequence
  Description of Artificial Sequence: Synthetic Peptide
  SITE (7)..(7): Xaa is C, D, E, F, G, H, K, P, Q, V, W, or Y
FKSNIRXL

SEQ ID NO: 1288 - protein, 8 aa, Artificial Sequence
  Description of Artificial Sequence: Synthetic Peptide
  SITE (7)..(7): Xaa is A, C, E, F, G, H, M, Q, T, V ,W, or Y
FKSNLRXL

SEQ ID NO: 1289 - protein, 8 aa, Artificial Sequence
  Description of Artificial Sequence: Synthetic Peptide
  SITE (7)..(7): Xaa is A, C, D, E, H, I, P, R, T, or Y
FKSNISXI

SEQ ID NO: 1290 - protein, 8 aa, Artificial Sequence
  Description of Artificial Sequence: Synthetic Peptide
  SITE (7)..(7): Xaa is A, C, F, G, H, P, Q, R, T, V, or Y
FKSNLSXI

SEQ ID NO: 1291 - protein, 8 aa, Artificial Sequence
  Description of Artificial Sequence: Synthetic Peptide
  SITE (7)..(7): Xaa is D, E, F, G, L, M, Q, R, T, or W
FKSNISXL

SEQ ID NO: 1292 - protein, 8 aa, Artificial Sequence
  Description of Artificial Sequence: Synthetic Peptide
  SITE (7)..(7): Xaa is A, C, D, E, F, G, H, M, Q, R, or W
FKSNLSXL

SEQ ID NO: 1293 - protein, 8 aa, Artificial Sequence
  Description of Artificial Sequence: Synthetic Peptide
  SITE (7)..(7): Xaa is A, C, D, F, G, H, K, M, P, Q, R, S, T, V, or Y
FKSQIDXI

SEQ ID NO: 1294 - protein, 8 aa, Artificial Sequence
  Description of Artificial Sequence: Synthetic Peptide
  SITE (7)..(7): Xaa is C, F, H, I, L, M, N, S, T, V, or Y
FKSQLDXI

SEQ ID NO: 1295 - protein, 8 aa, Artificial Sequence
  Description of Artificial Sequence: Synthetic Peptide
  SITE (7)..(7): Xaa is C, D, F, H, I, L, P, Q, S, T, V, or Y
FKSQIDXL

SEQ ID NO: 1296 - protein, 8 aa, Artificial Sequence
  Description of Artificial Sequence: Synthetic Peptide
  SITE (7)..(7): Xaa is A, C, E, F, H, M, N, P, Q, S, T, V, W, or Y
FKSQLDXL

SEQ ID NO: 1297 - protein, 8 aa, Artificial Sequence
  Description of Artificial Sequence: Synthetic Peptide
  SITE (7)..(7): Xaa is A, C, E, F, G, H, K, N, P, Q, R, V, W, or Y
FKSQIRXI

SEQ ID NO: 1298 - protein, 8 aa, Artificial Sequence
  Description of Artificial Sequence: Synthetic Peptide
  SITE (7)..(7): Xaa is C, D, E, F, G, H, I, M, P, R, T, V, W, or Y
FKSQLRXI

SEQ ID NO: 1299 - protein, 8 aa, Artificial Sequence
  Description of Artificial Sequence: Synthetic Peptide
  SITE (7)..(7): Xaa is A, C, D, G, H, K, N, P, Q, S, T, V, or W
FKSQIRXL

SEQ ID NO: 1300 - protein, 8 aa, Artificial Sequence
  Description of Artificial Sequence: Synthetic Peptide
  SITE (7)..(7): Xaa is A, C, F, G, H, I, L, M, N, P, Q, V, W, or Y
FKSQLRXL

SEQ ID NO: 1301 - protein, 8 aa, Artificial Sequence
  Description of Artificial Sequence: Synthetic Peptide
  SITE (7)..(7): Xaa is C, E, G, H, L, M, N, P, R, S, T, W, or Y
FKSQISXI

SEQ ID NO: 1302 - protein, 8 aa, Artificial Sequence
  Description of Artificial Sequence: Synthetic Peptide
  SITE (7)..(7): Xaa is C, F, I, M, P, Q, R, S, T, V, W, or Y
FKSQLSXI

SEQ ID NO: 1303 - protein, 8 aa, Artificial Sequence
  Description of Artificial Sequence: Synthetic Peptide
  SITE (7)..(7): Xaa is A, C, G, H, I, M, N, P, R, T, V, or Y
FKSQISXL

SEQ ID NO: 1304 - protein, 8 aa, Artificial Sequence
  Description of Artificial Sequence: Synthetic Peptide
  SITE (7)..(7): Xaa is C, H, I, M, N, Q, R, W, or Y
FKSQLSXL

SEQ ID NO: 1305 - protein, 8 aa, Artificial Sequence
  Description of Artificial Sequence: Synthetic Peptide
  SITE (7)..(7): Xaa is A, C, D, E, G, H, I, L, N, Q, R, S, W, or Y
FKSSIDXI

SEQ ID NO: 1306 - protein, 8 aa, Artificial Sequence
  Description of Artificial Sequence: Synthetic Peptide
  SITE (7)..(7): Xaa is A, C, D, F, G, H, I, M, P, R, T, W, or Y
FKSSLDXI

SEQ ID NO: 1307 - protein, 8 aa, Artificial Sequence
  Description of Artificial Sequence: Synthetic Peptide
  SITE (7)..(7): Xaa is H, I, M, N, P, Q, S, T, V, W, or Y
FKSSIDXL

SEQ ID NO: 1308 - protein, 8 aa, Artificial Sequence
  Description of Artificial Sequence: Synthetic Peptide
  SITE (7)..(7): Xaa is C, F, K, L, M, Q, T, W, or Y
FKSSLDXL

SEQ ID NO: 1309 - protein, 8 aa, Artificial Sequence
  Description of Artificial Sequence: Synthetic Peptide
  SITE (7)..(7): Xaa is C, F, G, H, L, M, P, Q, R, S, W, or Y
FKSSIRXI

SEQ ID NO: 1310 - protein, 8 aa, Artificial Sequence
  Description of Artificial Sequence: Synthetic Peptide
  SITE (7)..(7): Xaa is A, C, D, E, F, G, H, I, L, M, N, P, Q, R, T, V, or W
FKSSLRXI

SEQ ID NO: 1311 - protein, 8 aa, Artificial Sequence
  Description of Artificial Sequence: Synthetic Peptide
  SITE (7)..(7): Xaa is C, E, F, G, H, I, M, N, P, Q, R, V, or W
FKSSIRXL

SEQ ID NO: 1312 - protein, 8 aa, Artificial Sequence
  Description of Artificial Sequence: Synthetic Peptide
  SITE (7)..(7): Xaa is D, E, F, H, L, M, P, Q, R, T, or W
FKSSLRXL

SEQ ID NO: 1313 - protein, 8 aa, Artificial Sequence
  Description of Artificial Sequence: Synthetic Peptide
  SITE (7)..(7): Xaa is C, D, E, G, P, R, V, W, or Y
FKSSISXI

SEQ ID NO: 1314 - protein, 8 aa, Artificial Sequence
  Description of Artificial Sequence: Synthetic Peptide
  SITE (7)..(7): Xaa is C, D, E, F, G, I, M, R, or W
FKSSLSXI

SEQ ID NO: 1315 - protein, 8 aa, Artificial Sequence
  Description of Artificial Sequence: Synthetic Peptide
  SITE (7)..(7): Xaa is C, H, I, N, Q, or T
FKSSISXL

SEQ ID NO: 1316 - protein, 8 aa, Artificial Sequence
  Description of Artificial Sequence: Synthetic Peptide
  SITE (7)..(7): Xaa is C, I, L, T, or Y
FKSSLSXL

SEQ ID NO: 1317 - protein, 8 aa, Artificial Sequence
  Description of Artificial Sequence: Synthetic Peptide
IGSNLRAL

SEQ ID NO: 1318 - protein, 8 aa, Artificial Sequence
  Description of Artificial Sequence: Synthetic Peptide
  SITE (7)..(7): Xaa is C, I, M, Q V, or W
LGADIDXI

SEQ ID NO: 1319 - protein, 8 aa, Artificial Sequence
  Description of Artificial Sequence: Synthetic Peptide
  SITE (7)..(7): Xaa is C, N, P, Q, S, W, or Y
LGADLDXI

SEQ ID NO: 1320 - protein, 8 aa, Artificial Sequence
  Description of Artificial Sequence: Synthetic Peptide
  SITE (7)..(7): Xaa is F, M, or W
LGADIDXL

SEQ ID NO: 1321 - protein, 8 aa, Artificial Sequence
  Description of Artificial Sequence: Synthetic Peptide
LGADLDCL

SEQ ID NO: 1322 - protein, 8 aa, Artificial Sequence
  Description of Artificial Sequence: Synthetic Peptide
  SITE (7)..(7): Xaa is A, D, H, or W
LGADIRXI

SEQ ID NO: 1323 - protein, 8 aa, Artificial Sequence
  Description of Artificial Sequence: Synthetic Peptide
  SITE (7)..(7): Xaa is C, F, H, M, N, or W
LGADLRXI

SEQ ID NO: 1324 - protein, 8 aa, Artificial Sequence
  Description of Artificial Sequence: Synthetic Peptide
  SITE (7)..(7): Xaa is M or N
LGADIRXL

SEQ ID NO: 1325 - protein, 8 aa, Artificial Sequence
  Description of Artificial Sequence: Synthetic Peptide
  SITE (7)..(7): Xaa is C, F, H, M, P, or Y
LGADISXI

SEQ ID NO: 1326 - protein, 8 aa, Artificial Sequence
  Description of Artificial Sequence: Synthetic Peptide
  SITE (7)..(7): Xaa is C, I, M, N, W, or Y
LGADLSXI

SEQ ID NO: 1327 - protein, 8 aa, Artificial Sequence
  Description of Artificial Sequence: Synthetic Peptide
  SITE (7)..(7): Xaa is C, Q, or W
LGADISXL

SEQ ID NO: 1328 - protein, 8 aa, Artificial Sequence
  Description of Artificial Sequence: Synthetic Peptide
  SITE (7)..(7): Xaa is C or M
LGADLSXL

SEQ ID NO: 1329 - protein, 8 aa, Artificial Sequence
  Description of Artificial Sequence: Synthetic Peptide
  SITE (7)..(7): Xaa is H, I, M, N, or W
LGAEIDXI

SEQ ID NO: 1330 - protein, 8 aa, Artificial Sequence
  Description of Artificial Sequence: Synthetic Peptide
  SITE (7)..(7): Xaa is C, N, or W
LGAELDXI

SEQ ID NO: 1331 - protein, 8 aa, Artificial Sequence
  Description of Artificial Sequence: Synthetic Peptide
LGAEIDML

SEQ ID NO: 1332 - protein, 8 aa, Artificial Sequence
  Description of Artificial Sequence: Synthetic Peptide
  SITE (7)..(7): Xaa is C or Y
LGAELDXL

SEQ ID NO: 1333 - protein, 8 aa, Artificial Sequence
  Description of Artificial Sequence: Synthetic Peptide
  SITE (7)..(7): Xaa is D, H, M, or P
LGAEIRXI

SEQ ID NO: 1334 - protein, 8 aa, Artificial Sequence
  Description of Artificial Sequence: Synthetic Peptide
  SITE (7)..(7): Xaa is C, F, H, M, S, T, W, or Y
LGAELRXI

SEQ ID NO: 1335 - protein, 8 aa, Artificial Sequence
  Description of Artificial Sequence: Synthetic Peptide
  SITE (7)..(7): Xaa is C, K, or W
LGAEIRXL

SEQ ID NO: 1336 - protein, 8 aa, Artificial Sequence
  Description of Artificial Sequence: Synthetic Peptide
  SITE (7)..(7): Xaa is A, C, H, N, or W
LGAEISXI

SEQ ID NO: 1337 - protein, 8 aa, Artificial Sequence
  Description of Artificial Sequence: Synthetic Peptide
  SITE (7)..(7): Xaa is C, F, M, or W
LGAELSXI

SEQ ID NO: 1338 - protein, 8 aa, Artificial Sequence
  Description of Artificial Sequence: Synthetic Peptide
  SITE (7)..(7): Xaa is H, I, V, or W
LGAEISXL

SEQ ID NO: 1339 - protein, 8 aa, Artificial Sequence
  Description of Artificial Sequence: Synthetic Peptide
LGAELSCL

SEQ ID NO: 1340 - protein, 8 aa, Artificial Sequence
  Description of Artificial Sequence: Synthetic Peptide
  SITE (7)..(7): Xaa is C, L, N, P, or W
LGANIDXI

SEQ ID NO: 1341 - protein, 8 aa, Artificial Sequence
  Description of Artificial Sequence: Synthetic Peptide
  SITE (7)..(7): Xaa is C, F, N, S, T, V, or Y
LGANLDXI

SEQ ID NO: 1342 - protein, 8 aa, Artificial Sequence
  Description of Artificial Sequence: Synthetic Peptide
  SITE (7)..(7): Xaa is C, D, E, H, M, or W
LGANIDXL

SEQ ID NO: 1343 - protein, 8 aa, Artificial Sequence
  Description of Artificial Sequence: Synthetic Peptide
  SITE (7)..(7): Xaa is C, G, I, or M
LGANLDXL

SEQ ID NO: 1344 - protein, 8 aa, Artificial Sequence
  Description of Artificial Sequence: Synthetic Peptide
  SITE (7)..(7): Xaa is D, F, H, I, K, N, Q, S, V, W, or Y
LGANIRXI

SEQ ID NO: 1345 - protein, 8 aa, Artificial Sequence
  Description of Artificial Sequence: Synthetic Peptide
  SITE (7)..(7): Xaa is F, G, H, I, K, L, V, W, or Y
LGANLRXI

SEQ ID NO: 1346 - protein, 8 aa, Artificial Sequence
  Description of Artificial Sequence: Synthetic Peptide
  SITE (7)..(7): Xaa is A, C, D, E, H, K, L, M, N, P, or W
LGANIRXL

SEQ ID NO: 1347 - protein, 8 aa, Artificial Sequence
  Description of Artificial Sequence: Synthetic Peptide
  SITE (7)..(7): Xaa is C, F, I, K, M, N, or P
LGANLRXL

SEQ ID NO: 1348 - protein, 8 aa, Artificial Sequence
  Description of Artificial Sequence: Synthetic Peptide
  SITE (7)..(7): Xaa is D, F, M, Q, R, or W
LGANISXI

SEQ ID NO: 1349 - protein, 8 aa, Artificial Sequence
  Description of Artificial Sequence: Synthetic Peptide
  SITE (7)..(7): Xaa is C, E, H, I, K, M, N, R, or W
LGANLSXI

SEQ ID NO: 1350 - protein, 8 aa, Artificial Sequence
  Description of Artificial Sequence: Synthetic Peptide
LGANISHL

SEQ ID NO: 1351 - protein, 8 aa, Artificial Sequence
  Description of Artificial Sequence: Synthetic Peptide
  SITE (7)..(7): Xaa is C, F, or N
LGANLSXL

SEQ ID NO: 1352 - protein, 8 aa, Artificial Sequence
  Description of Artificial Sequence: Synthetic Peptide
  SITE (7)..(7): Xaa is C, D, E, H, M, T, or W
LGAQIDXI

SEQ ID NO: 1353 - protein, 8 aa, Artificial Sequence
  Description of Artificial Sequence: Synthetic Peptide
  SITE (7)..(7): Xaa is C, D, H, M, N, P, S, V, W, or Y
LGAQLDXI

SEQ ID NO: 1354 - protein, 8 aa, Artificial Sequence
  Description of Artificial Sequence: Synthetic Peptide
  SITE (7)..(7): Xaa is F, I, M, N, or W
LGAQIDXL

SEQ ID NO: 1355 - protein, 8 aa, Artificial Sequence
  Description of Artificial Sequence: Synthetic Peptide
  SITE (7)..(7): Xaa is C, H, N, W, or Y
LGAQLDXL

SEQ ID NO: 1356 - protein, 8 aa, Artificial Sequence
  Description of Artificial Sequence: Synthetic Peptide
  SITE (7)..(7): Xaa is A, G, H, I, P, Q, W, or Y
LGAQIRXI

SEQ ID NO: 1357 - protein, 8 aa, Artificial Sequence
  Description of Artificial Sequence: Synthetic Peptide
  SITE (7)..(7): Xaa is C, D, H, I, L, M, N, Q, W, or Y
LGAQLRXI

SEQ ID NO: 1358 - protein, 8 aa, Artificial Sequence
  Description of Artificial Sequence: Synthetic Peptide
  SITE (7)..(7): Xaa is C, G, K, N, S, or W
LGAQIRXL

SEQ ID NO: 1359 - protein, 8 aa, Artificial Sequence
  Description of Artificial Sequence: Synthetic Peptide
  SITE (7)..(7): Xaa is F or W
LGAQLRXL

SEQ ID NO: 1360 - protein, 8 aa, Artificial Sequence
  Description of Artificial Sequence: Synthetic Peptide
  SITE (7)..(7): Xaa is C, F, I, M, T, or W
LGAQISXI

SEQ ID NO: 1361 - protein, 8 aa, Artificial Sequence
  Description of Artificial Sequence: Synthetic Peptide
  SITE (7)..(7): Xaa is C, H, I, L, M, R, V, or W
LGAQLSXI

SEQ ID NO: 1362 - protein, 8 aa, Artificial Sequence
  Description of Artificial Sequence: Synthetic Peptide
  SITE (7)..(7): Xaa is C, F, K, M, Q, or W
LGAQISXL

SEQ ID NO: 1363 - protein, 8 aa, Artificial Sequence
  Description of Artificial Sequence: Synthetic Peptide
  SITE (7)..(7): Xaa is C, H, N, or W
LGAQLSXL

SEQ ID NO: 1364 - protein, 8 aa, Artificial Sequence
  Description of Artificial Sequence: Synthetic Peptide
  SITE (7)..(7): Xaa is C, F, H, I, M, N, or W
LGASIDXI

SEQ ID NO: 1365 - protein, 8 aa, Artificial Sequence
  Description of Artificial Sequence: Synthetic Peptide
  SITE (7)..(7): Xaa is C, H, or W
LGASLDXI

SEQ ID NO: 1366 - protein, 8 aa, Artificial Sequence
  Description of Artificial Sequence: Synthetic Peptide
  SITE (7)..(7): Xaa is C, H, or P
LGASIDXL

SEQ ID NO: 1367 - protein, 8 aa, Artificial Sequence
  Description of Artificial Sequence: Synthetic Peptide
  SITE (7)..(7): Xaa is C, F, H, I, K, or M
LGASIRXI

SEQ ID NO: 1368 - protein, 8 aa, Artificial Sequence
  Description of Artificial Sequence: Synthetic Peptide
  SITE (7)..(7): Xaa is C, F, or M
LGASLRXI

SEQ ID NO: 1369 - protein, 8 aa, Artificial Sequence
  Description of Artificial Sequence: Synthetic Peptide
  SITE (7)..(7): Xaa is H, K, P, W, or Y
LGASIRXL

SEQ ID NO: 1370 - protein, 8 aa, Artificial Sequence
  Description of Artificial Sequence: Synthetic Peptide
LGASLRCL

SEQ ID NO: 1371 - protein, 8 aa, Artificial Sequence
  Description of Artificial Sequence: Synthetic Peptide
  SITE (7)..(7): Xaa is C, H, M ,P, or W
LGASISXI

SEQ ID NO: 1372 - protein, 8 aa, Artificial Sequence
  Description of Artificial Sequence: Synthetic Peptide
LGASLSPI

SEQ ID NO: 1373 - protein, 8 aa, Artificial Sequence
  Description of Artificial Sequence: Synthetic Peptide
  SITE (7)..(7): Xaa is I, M, or W
LGASISXL

SEQ ID NO: 1374 - protein, 8 aa, Artificial Sequence
  Description of Artificial Sequence: Synthetic Peptide
  SITE (7)..(7): Xaa is C, D, F, H, I, M, N, Q, T, or W
LGGDIDXI

SEQ ID NO: 1375 - protein, 8 aa, Artificial Sequence
  Description of Artificial Sequence: Synthetic Peptide
  SITE (7)..(7): Xaa is H, M, P, or Y
LGGDLDXI

SEQ ID NO: 1376 - protein, 8 aa, Artificial Sequence
  Description of Artificial Sequence: Synthetic Peptide
  SITE (7)..(7): Xaa is C, H, M, Q, or S
LGGDIDXL

SEQ ID NO: 1377 - protein, 8 aa, Artificial Sequence
  Description of Artificial Sequence: Synthetic Peptide
  SITE (7)..(7): Xaa is C, M, or W
LGGDLDXL

SEQ ID NO: 1378 - protein, 8 aa, Artificial Sequence
  Description of Artificial Sequence: Synthetic Peptide
  SITE (7)..(7): Xaa is C, D, F, G, K, M, W, or Y
LGGDIRXI

SEQ ID NO: 1379 - protein, 8 aa, Artificial Sequence
  Description of Artificial Sequence: Synthetic Peptide
  SITE (7)..(7): Xaa is C, D, E, H, K, L, M, W, or Y
LGGDLRXI

SEQ ID NO: 1380 - protein, 8 aa, Artificial Sequence
  Description of Artificial Sequence: Synthetic Peptide
  SITE (7)..(7): Xaa is C, G, H, L, M, or W
LGGDIRXL

SEQ ID NO: 1381 - protein, 8 aa, Artificial Sequence
  Description of Artificial Sequence: Synthetic Peptide
  SITE (7)..(7): Xaa is F, M, N, W, or Y
LGGDLRXL

SEQ ID NO: 1382 - protein, 8 aa, Artificial Sequence
  Description of Artificial Sequence: Synthetic Peptide
  SITE (7)..(7): Xaa is C, F, H, I, L, M, Q, W, or Y
LGGDISXI

SEQ ID NO: 1383 - protein, 8 aa, Artificial Sequence
  Description of Artificial Sequence: Synthetic Peptide
  SITE (7)..(7): Xaa is D, M, or Q
LGGDLSXI

SEQ ID NO: 1384 - protein, 8 aa, Artificial Sequence
  Description of Artificial Sequence: Synthetic Peptide
  SITE (7)..(7): Xaa is H, M, or W
LGGDISXL

SEQ ID NO: 1385 - protein, 8 aa, Artificial Sequence
  Description of Artificial Sequence: Synthetic Peptide
LGGDLSIL

SEQ ID NO: 1386 - protein, 8 aa, Artificial Sequence
  Description of Artificial Sequence: Synthetic Peptide
  SITE (7)..(7): Xaa is C, M, or S
LGGEIDXI

SEQ ID NO: 1387 - protein, 8 aa, Artificial Sequence
  Description of Artificial Sequence: Synthetic Peptide
  SITE (7)..(7): Xaa is I, K, N, Q, or W
LGGELDXI

SEQ ID NO: 1388 - protein, 8 aa, Artificial Sequence
  Description of Artificial Sequence: Synthetic Peptide
  SITE (7)..(7): Xaa is H, P, or R
LGGEIDXL

SEQ ID NO: 1389 - protein, 8 aa, Artificial Sequence
  Description of Artificial Sequence: Synthetic Peptide
LGGELDWL

SEQ ID NO: 1390 - protein, 8 aa, Artificial Sequence
  Description of Artificial Sequence: Synthetic Peptide
  SITE (7)..(7): Xaa is C, D, F, I, M, V, W, or Y
LGGEIRXI

SEQ ID NO: 1391 - protein, 8 aa, Artificial Sequence
  Description of Artificial Sequence: Synthetic Peptide
  SITE (7)..(7): Xaa is C, F, H, M, or T
LGGELRXI

SEQ ID NO: 1392 - protein, 8 aa, Artificial Sequence
  Description of Artificial Sequence: Synthetic Peptide
  SITE (7)..(7): Xaa is H, N, or P
LGGEIRXL

SEQ ID NO: 1393 - protein, 8 aa, Artificial Sequence
  Description of Artificial Sequence: Synthetic Peptide
  SITE (7)..(7): Xaa is M or W
LGGELRXL

SEQ ID NO: 1394 - protein, 8 aa, Artificial Sequence
  Description of Artificial Sequence: Synthetic Peptide
  SITE (7)..(7): Xaa is E, H, I, P, W, and Y
LGGEISXI

SEQ ID NO: 1395 - protein, 8 aa, Artificial Sequence
  Description of Artificial Sequence: Synthetic Peptide
  SITE (7)..(7): Xaa is F, H, I, K, M, T, W, and Y
LGGELSXI

SEQ ID NO: 1396 - protein, 8 aa, Artificial Sequence
  Description of Artificial Sequence: Synthetic Peptide
  SITE (7)..(7): Xaa is C, G, H, M, and W
LGGEISXL

SEQ ID NO: 1397 - protein, 8 aa, Artificial Sequence
  Description of Artificial Sequence: Synthetic Peptide
  SITE (7)..(7): Xaa is C and W
LGGELSXL

SEQ ID NO: 1398 - protein, 8 aa, Artificial Sequence
  Description of Artificial Sequence: Synthetic Peptide
  SITE (7)..(7): Xaa is C, M, P, Q, T, W, or Y
LGGNIDXI

SEQ ID NO: 1399 - protein, 8 aa, Artificial Sequence
  Description of Artificial Sequence: Synthetic Peptide
  SITE (7)..(7): Xaa is F, G, N, W, or Y
LGGNLDXI

SEQ ID NO: 1400 - protein, 8 aa, Artificial Sequence
  Description of Artificial Sequence: Synthetic Peptide
  SITE (7)..(7): Xaa is C, F, M, or V
LGGNIDXL

SEQ ID NO: 1401 - protein, 8 aa, Artificial Sequence
  Description of Artificial Sequence: Synthetic Peptide
  SITE (7)..(7): Xaa is A, C, H, K, P, W, or Y
LGGNLDXL

SEQ ID NO: 1402 - protein, 8 aa, Artificial Sequence
  Description of Artificial Sequence: Synthetic Peptide
  SITE (7)..(7): Xaa is C, E, H, I, P, Q, S, W, or Y
LGGNIRXI

SEQ ID NO: 1403 - protein, 8 aa, Artificial Sequence
  Description of Artificial Sequence: Synthetic Peptide
  SITE (7)..(7): Xaa is D, K, M, N, P, R, or W
LGGNLRXI

SEQ ID NO: 1404 - protein, 8 aa, Artificial Sequence
  Description of Artificial Sequence: Synthetic Peptide
  SITE (7)..(7): Xaa is D, H, M, P, Q, S, or W
LGGNIRXL

SEQ ID NO: 1405 - protein, 8 aa, Artificial Sequence
  Description of Artificial Sequence: Synthetic Peptide
  SITE (7)..(7): Xaa is C, N, P, Q, T, W, or Y
LGGNLRXL

SEQ ID NO: 1406 - protein, 8 aa, Artificial Sequence
  Description of Artificial Sequence: Synthetic Peptide
  SITE (7)..(7): Xaa is D, Q, R, or W
LGGNISXI

SEQ ID NO: 1407 - protein, 8 aa, Artificial Sequence
  Description of Artificial Sequence: Synthetic Peptide
  SITE (7)..(7): Xaa is C, N, or  W,
LGGNLSXI

SEQ ID NO: 1408 - protein, 8 aa, Artificial Sequence
  Description of Artificial Sequence: Synthetic Peptide
  SITE (7)..(7): Xaa is C, D, F, I, M, P, or W
LGGNISXL

SEQ ID NO: 1409 - protein, 8 aa, Artificial Sequence
  Description of Artificial Sequence: Synthetic Peptide
  SITE (7)..(7): Xaa is E, K, Q, W, or Y
LGGNLSXL

SEQ ID NO: 1410 - protein, 8 aa, Artificial Sequence
  Description of Artificial Sequence: Synthetic Peptide
  SITE (7)..(7): Xaa is C, D, G, H, I, K, M, P, Q, S, W, or Y
LGGQIDXI

SEQ ID NO: 1411 - protein, 8 aa, Artificial Sequence
  Description of Artificial Sequence: Synthetic Peptide
  SITE (7)..(7): Xaa is C, L, M, N, P, Q, R, W, or Y
LGGQLDXI

SEQ ID NO: 1412 - protein, 8 aa, Artificial Sequence
  Description of Artificial Sequence: Synthetic Peptide
  SITE (7)..(7): Xaa is C, G, H, L, P, T, W, or Y
LGGQIDXL

SEQ ID NO: 1413 - protein, 8 aa, Artificial Sequence
  Description of Artificial Sequence: Synthetic Peptide
  SITE (7)..(7): Xaa is C, H, M, N, P, or W
LGGQLDXL

SEQ ID NO: 1414 - protein, 8 aa, Artificial Sequence
  Description of Artificial Sequence: Synthetic Peptide
  SITE (7)..(7): Xaa is C, E, F, G, H, I, K, M, N, P, R, or W
LGGQIRXI

SEQ ID NO: 1415 - protein, 8 aa, Artificial Sequence
  Description of Artificial Sequence: Synthetic Peptide
  SITE (7)..(7): Xaa is A, C, H, I, M, N, V, or W
LGGQLRXI

SEQ ID NO: 1416 - protein, 8 aa, Artificial Sequence
  Description of Artificial Sequence: Synthetic Peptide
  SITE (7)..(7): Xaa is A, C, D, E, G, I, K, L, M, N, R, T, V, or W
LGGQIRXL

SEQ ID NO: 1417 - protein, 8 aa, Artificial Sequence
  Description of Artificial Sequence: Synthetic Peptide
  SITE (7)..(7): Xaa is C, H, or M
LGGQLRXL

SEQ ID NO: 1418 - protein, 8 aa, Artificial Sequence
  Description of Artificial Sequence: Synthetic Peptide
  SITE (7)..(7): Xaa is A, C, D, F, K, N, R, S, T, or W
LGGQISXI

SEQ ID NO: 1419 - protein, 8 aa, Artificial Sequence
  Description of Artificial Sequence: Synthetic Peptide
  SITE (7)..(7): Xaa is A, C, F, G, I, L, V, or W
LGGQLSXI

SEQ ID NO: 1420 - protein, 8 aa, Artificial Sequence
  Description of Artificial Sequence: Synthetic Peptide
  SITE (7)..(7): Xaa is C, H, K, or M
LGGQISXL

SEQ ID NO: 1421 - protein, 8 aa, Artificial Sequence
  Description of Artificial Sequence: Synthetic Peptide
  SITE (7)..(7): Xaa is C, or W
LGGQLSXL

SEQ ID NO: 1422 - protein, 8 aa, Artificial Sequence
  Description of Artificial Sequence: Synthetic Peptide
  SITE (7)..(7): Xaa is C, G, I, K, N, P, R, V, or W
LGGSIDXI

SEQ ID NO: 1423 - protein, 8 aa, Artificial Sequence
  Description of Artificial Sequence: Synthetic Peptide
  SITE (7)..(7): Xaa is F, K, M, S, T, or W
LGGSLDXI

SEQ ID NO: 1424 - protein, 8 aa, Artificial Sequence
  Description of Artificial Sequence: Synthetic Peptide
  SITE (7)..(7): Xaa is H, M, or W
LGGSIDXL

SEQ ID NO: 1425 - protein, 8 aa, Artificial Sequence
  Description of Artificial Sequence: Synthetic Peptide
LGGSLDML

SEQ ID NO: 1426 - protein, 8 aa, Artificial Sequence
  Description of Artificial Sequence: Synthetic Peptide
  SITE (7)..(7): Xaa is C, D, G, H, I, K, M, N, T, W, or Y
LGGSIRXI

SEQ ID NO: 1427 - protein, 8 aa, Artificial Sequence
  Description of Artificial Sequence: Synthetic Peptide
  SITE (7)..(7): Xaa is C, F, G, H, or W
LGGSLRXI

SEQ ID NO: 1428 - protein, 8 aa, Artificial Sequence
  Description of Artificial Sequence: Synthetic Peptide
  SITE (7)..(7): Xaa is C, H, P, Q, or W
LGGSIRXL

SEQ ID NO: 1429 - protein, 8 aa, Artificial Sequence
  Description of Artificial Sequence: Synthetic Peptide
  SITE (7)..(7): Xaa is C
LGGSLRXL

SEQ ID NO: 1430 - protein, 8 aa, Artificial Sequence
  Description of Artificial Sequence: Synthetic Peptide
  SITE (7)..(7): Xaa is C, G, I, K, N, P, R, V, or W
LGGSISXI

SEQ ID NO: 1431 - protein, 8 aa, Artificial Sequence
  Description of Artificial Sequence: Synthetic Peptide
  SITE (7)..(7): Xaa is C, H, M, or P
LGGSLSXI

SEQ ID NO: 1432 - protein, 8 aa, Artificial Sequence
  Description of Artificial Sequence: Synthetic Peptide
  SITE (7)..(7): Xaa is C, H, P, Q, or W
LGGSISXL

SEQ ID NO: 1433 - protein, 8 aa, Artificial Sequence
  Description of Artificial Sequence: Synthetic Peptide
  SITE (7)..(7): Xaa is H, or M
LGGSLSXL

SEQ ID NO: 1434 - protein, 8 aa, Artificial Sequence
  Description of Artificial Sequence: Synthetic Peptide
  SITE (7)..(7): Xaa is F, G, H, P, W, or Y
LGLDIDXI

SEQ ID NO: 1435 - protein, 8 aa, Artificial Sequence
  Description of Artificial Sequence: Synthetic Peptide
  SITE (7)..(7): Xaa is C or W
LGLDLDXI

SEQ ID NO: 1436 - protein, 8 aa, Artificial Sequence
  Description of Artificial Sequence: Synthetic Peptide
  SITE (7)..(7): Xaa is C or H
LGLDIDXL

SEQ ID NO: 1437 - protein, 8 aa, Artificial Sequence
  Description of Artificial Sequence: Synthetic Peptide
LGLDLDCL

SEQ ID NO: 1438 - protein, 8 aa, Artificial Sequence
  Description of Artificial Sequence: Synthetic Peptide
  SITE (7)..(7): Xaa is C, I, M, T, or Y
LGLDIRXI

SEQ ID NO: 1439 - protein, 8 aa, Artificial Sequence
  Description of Artificial Sequence: Synthetic Peptide
  SITE (7)..(7): Xaa is C, F, or W
LGLDLRXI

SEQ ID NO: 1440 - protein, 8 aa, Artificial Sequence
  Description of Artificial Sequence: Synthetic Peptide
  SITE (7)..(7): Xaa is F, M, N, Q, W, or Y
LGLDIRXL

SEQ ID NO: 1441 - protein, 8 aa, Artificial Sequence
  Description of Artificial Sequence: Synthetic Peptide
  SITE (7)..(7): Xaa is C, W, or Y
LGLDLRXL

SEQ ID NO: 1442 - protein, 8 aa, Artificial Sequence
  Description of Artificial Sequence: Synthetic Peptide
  SITE (7)..(7): Xaa is C, Q, or W
LGLDISXI

SEQ ID NO: 1443 - protein, 8 aa, Artificial Sequence
  Description of Artificial Sequence: Synthetic Peptide
LGLDLSCI

SEQ ID NO: 1444 - protein, 8 aa, Artificial Sequence
  Description of Artificial Sequence: Synthetic Peptide
  SITE (7)..(7): Xaa is C, F, or W
LGLDISXL

SEQ ID NO: 1445 - protein, 8 aa, Artificial Sequence
  Description of Artificial Sequence: Synthetic Peptide
LGLDLSCL

SEQ ID NO: 1446 - protein, 8 aa, Artificial Sequence
  Description of Artificial Sequence: Synthetic Peptide
  SITE (7)..(7): Xaa is C, L, S, or W
LGLEIDXI

SEQ ID NO: 1447 - protein, 8 aa, Artificial Sequence
  Description of Artificial Sequence: Synthetic Peptide
  SITE (7)..(7): Xaa is A, C, I, M, or W
LGLELDXI

SEQ ID NO: 1448 - protein, 8 aa, Artificial Sequence
  Description of Artificial Sequence: Synthetic Peptide
  SITE (7)..(7): Xaa is C, F, H, K, P, R, or W
LGLEIDXL

SEQ ID NO: 1449 - protein, 8 aa, Artificial Sequence
  Description of Artificial Sequence: Synthetic Peptide
  SITE (7)..(7): Xaa is C, H, M, P, V, W, or Y
LGLELDXL

SEQ ID NO: 1450 - protein, 8 aa, Artificial Sequence
  Description of Artificial Sequence: Synthetic Peptide
  SITE (7)..(7): Xaa is C, E, F, I, L, M, Q, S, V, or W
LGLEIRXI

SEQ ID NO: 1451 - protein, 8 aa, Artificial Sequence
  Description of Artificial Sequence: Synthetic Peptide
  SITE (7)..(7): Xaa is C, Q, S, T, W, or Y
LGLELRXI

SEQ ID NO: 1452 - protein, 8 aa, Artificial Sequence
  Description of Artificial Sequence: Synthetic Peptide
  SITE (7)..(7): Xaa is C, F, H, M, S, T, W, or Y
LGLEIRXL

SEQ ID NO: 1453 - protein, 8 aa, Artificial Sequence
  Description of Artificial Sequence: Synthetic Peptide
  SITE (7)..(7): Xaa is C, F, H, L, M, N, or W
LGLEISXI

SEQ ID NO: 1454 - protein, 8 aa, Artificial Sequence
  Description of Artificial Sequence: Synthetic Peptide
  SITE (7)..(7): Xaa is I, M, N, W, or Y
LGLELSXI

SEQ ID NO: 1455 - protein, 8 aa, Artificial Sequence
  Description of Artificial Sequence: Synthetic Peptide
  SITE (7)..(7): Xaa is I, P, or Y
LGLEISXL

SEQ ID NO: 1456 - protein, 8 aa, Artificial Sequence
  Description of Artificial Sequence: Synthetic Peptide
  SITE (7)..(7): Xaa is C, M, W, or Y
LGLELSXL

SEQ ID NO: 1457 - protein, 8 aa, Artificial Sequence
  Description of Artificial Sequence: Synthetic Peptide
  SITE (7)..(7): Xaa is C, K, M, Q, S, T, or Y
LGLNIDXI

SEQ ID NO: 1458 - protein, 8 aa, Artificial Sequence
  Description of Artificial Sequence: Synthetic Peptide
  SITE (7)..(7): Xaa is F, H, M, T, or Y
LGLNLDXI

SEQ ID NO: 1459 - protein, 8 aa, Artificial Sequence
  Description of Artificial Sequence: Synthetic Peptide
  SITE (7)..(7): Xaa is C, P, Q, W, or Y
LGLNIDXL

SEQ ID NO: 1460 - protein, 8 aa, Artificial Sequence
  Description of Artificial Sequence: Synthetic Peptide
  SITE (7)..(7): Xaa is C, H, K, L, M, or R
LGLNLDXL

SEQ ID NO: 1461 - protein, 8 aa, Artificial Sequence
  Description of Artificial Sequence: Synthetic Peptide
  SITE (7)..(7): Xaa is A, C, D, G, H, K, L, M, N, P, Q, T, or W
LGLNIRXI

SEQ ID NO: 1462 - protein, 8 aa, Artificial Sequence
  Description of Artificial Sequence: Synthetic Peptide
  SITE (7)..(7): Xaa is C, G, H, I, K, L, M, T, V, W, or Y
LGLNLRXI

SEQ ID NO: 1463 - protein, 8 aa, Artificial Sequence
  Description of Artificial Sequence: Synthetic Peptide
  SITE (7)..(7): Xaa is C, F, M, N, P, Q, R, T, V, or W
LGLNIRXL

SEQ ID NO: 1464 - protein, 8 aa, Artificial Sequence
  Description of Artificial Sequence: Synthetic Peptide
  SITE (7)..(7): Xaa is A, C, K, or M
LGLNLRXL

SEQ ID NO: 1465 - protein, 8 aa, Artificial Sequence
  Description of Artificial Sequence: Synthetic Peptide
  SITE (7)..(7): Xaa is A, C, F, H, Q or W
LGLNISXI

SEQ ID NO: 1466 - protein, 8 aa, Artificial Sequence
  Description of Artificial Sequence: Synthetic Peptide
  SITE (7)..(7): Xaa is C, K, N, Q, or Y
LGLNLSXI

SEQ ID NO: 1467 - protein, 8 aa, Artificial Sequence
  Description of Artificial Sequence: Synthetic Peptide
  SITE (7)..(7): Xaa is C, E, F, G, H, or W
LGLNISXL

SEQ ID NO: 1468 - protein, 8 aa, Artificial Sequence
  Description of Artificial Sequence: Synthetic Peptide
  SITE (7)..(7): Xaa is M or W
LGLNLSXL

SEQ ID NO: 1469 - protein, 8 aa, Artificial Sequence
  Description of Artificial Sequence: Synthetic Peptide
  SITE (7)..(7): Xaa is A, E, F, I, K, N, P, Q, R, T, or W
LGLQIDXI

SEQ ID NO: 1470 - protein, 8 aa, Artificial Sequence
  Description of Artificial Sequence: Synthetic Peptide
  SITE (7)..(7): Xaa is C, I, K, M, or Y
LGLQIDXL

SEQ ID NO: 1471 - protein, 8 aa, Artificial Sequence
  Description of Artificial Sequence: Synthetic Peptide
  SITE (7)..(7): Xaa is C, E, G, I, K, M, or W
LGLQIDXL

SEQ ID NO: 1472 - protein, 8 aa, Artificial Sequence
  Description of Artificial Sequence: Synthetic Peptide
  SITE (7)..(7): Xaa is C, F, R, A, C, E, F, G, I, M, P, T, or V
LGLQLDXL

SEQ ID NO: 1473 - protein, 8 aa, Artificial Sequence
  Description of Artificial Sequence: Synthetic Peptide
  SITE (7)..(7): Xaa is A, C, E, F, H, I, K, L, M, N, O, Q, R, V, W, or Y
LGLQIRXI

SEQ ID NO: 1474 - protein, 8 aa, Artificial Sequence
  Description of Artificial Sequence: Synthetic Peptide
  SITE (7)..(7): Xaa is C, I, L, M, P, S, T, or W
LGLQLRXI

SEQ ID NO: 1475 - protein, 8 aa, Artificial Sequence
  Description of Artificial Sequence: Synthetic Peptide
  SITE (7)..(7): Xaa is C, D, E, M, P, R, S, or W
LGLQIRXL

SEQ ID NO: 1476 - protein, 8 aa, Artificial Sequence
  Description of Artificial Sequence: Synthetic Peptide
  SITE (7)..(7): Xaa is C, D, F, I, M, T, W, or Y
LGLQLRXL

SEQ ID NO: 1477 - protein, 8 aa, Artificial Sequence
  Description of Artificial Sequence: Synthetic Peptide
  SITE (7)..(7): Xaa is C, F, H, I, M, Q, R, S, V, or W
LGLQISXI

SEQ ID NO: 1478 - protein, 8 aa, Artificial Sequence
  Description of Artificial Sequence: Synthetic Peptide
  SITE (7)..(7): Xaa is C, I, M, N, Q, or Y
LGLQLSXI

SEQ ID NO: 1479 - protein, 8 aa, Artificial Sequence
  Description of Artificial Sequence: Synthetic Peptide
  SITE (7)..(7): Xaa is C, H, K, M, P, or Q
LGLQISXL

SEQ ID NO: 1480 - protein, 8 aa, Artificial Sequence
  Description of Artificial Sequence: Synthetic Peptide
  SITE (7)..(7): Xaa is H or M
LGLQLSXL

SEQ ID NO: 1481 - protein, 8 aa, Artificial Sequence
  Description of Artificial Sequence: Synthetic Peptide
  SITE (7)..(7): Xaa is F, M, P, W, or Y
LGLSIDXI

SEQ ID NO: 1482 - protein, 8 aa, Artificial Sequence
  Description of Artificial Sequence: Synthetic Peptide
  SITE (7)..(7): Xaa is C, F, H, or P
LGLSIDXL

SEQ ID NO: 1483 - protein, 8 aa, Artificial Sequence
  Description of Artificial Sequence: Synthetic Peptide
  SITE (7)..(7): Xaa is C, H, or Y
LGLSLDXL

SEQ ID NO: 1484 - protein, 8 aa, Artificial Sequence
  Description of Artificial Sequence: Synthetic Peptide
  SITE (7)..(7): Xaa is D, F, H, K, L, M, R, S, or Y
LGLSIRXI

SEQ ID NO: 1485 - protein, 8 aa, Artificial Sequence
  Description of Artificial Sequence: Synthetic Peptide
  SITE (7)..(7): Xaa is C, I, or Y
LGLSLRXI

SEQ ID NO: 1486 - protein, 8 aa, Artificial Sequence
  Description of Artificial Sequence: Synthetic Peptide
  SITE (7)..(7): Xaa is C, K, M, or V
LGLSIRXL

SEQ ID NO: 1487 - protein, 9 aa, Artificial Sequence
  Description of Artificial Sequence: Synthetic Peptide
  misc_feature (7)..(7): Xaa can be any naturally occurring amino acid
LGLSLRXCL

SEQ ID NO: 1488 - protein, 8 aa, Artificial Sequence
  Description of Artificial Sequence: Synthetic Peptide
LGLSISWI

SEQ ID NO: 1489 - protein, 8 aa, Artificial Sequence
  Description of Artificial Sequence: Synthetic Peptide
LGLSLSCI

SEQ ID NO: 1490 - protein, 8 aa, Artificial Sequence
  Description of Artificial Sequence: Synthetic Peptide
LGLSISHL

SEQ ID NO: 1491 - protein, 8 aa, Artificial Sequence
  Description of Artificial Sequence: Synthetic Peptide
  SITE (7)..(7): Xaa is C, H, I, K, L, N, T, or Y
LGNDIDXI

SEQ ID NO: 1492 - protein, 8 aa, Artificial Sequence
  Description of Artificial Sequence: Synthetic Peptide
  SITE (7)..(7): Xaa is C, G, H ,M, P, or W
LGNDLDXI

SEQ ID NO: 1493 - protein, 8 aa, Artificial Sequence
  Description of Artificial Sequence: Synthetic Peptide
  SITE (7)..(7): Xaa is G, H, M, P, or W
LGNDLDXI

SEQ ID NO: 1494 - protein, 8 aa, Artificial Sequence
  Description of Artificial Sequence: Synthetic Peptide
  SITE (7)..(7): Xaa is D, E, F, I, K, M, P, or W
LGNDIDXL

SEQ ID NO: 1495 - protein, 8 aa, Artificial Sequence
  Description of Artificial Sequence: Synthetic Peptide
  SITE (7)..(7): Xaa is C, F, M, V, or W
LGNDLDXL

SEQ ID NO: 1496 - protein, 8 aa, Artificial Sequence
  Description of Artificial Sequence: Synthetic Peptide
  SITE (7)..(7): Xaa is C, F, G, H ,I, M, T, or W
LGNDLRXI

SEQ ID NO: 1497 - protein, 8 aa, Artificial Sequence
  Description of Artificial Sequence: Synthetic Peptide
  SITE (7)..(7): Xaa is A, C,E, F, G, H, M, N, Q, T, W, or Y
LGNDIRXL

SEQ ID NO: 1498 - protein, 8 aa, Artificial Sequence
  Description of Artificial Sequence: Synthetic Peptide
  SITE (7)..(7): Xaa is C, D, G, H, I, M, P, V, W, or Y
LGNDLRXL

SEQ ID NO: 1499 - protein, 8 aa, Artificial Sequence
  Description of Artificial Sequence: Synthetic Peptide
  SITE (7)..(7): Xaa is C, D, E, F, H, I, K, L, P, S, T, V, W, or Y
LGNDISXI

SEQ ID NO: 1500 - protein, 8 aa, Artificial Sequence
  Description of Artificial Sequence: Synthetic Peptide
  SITE (7)..(7): Xaa is C, E, F, H, I, L, M, N, W, or Y
LGNDLSXI

SEQ ID NO: 1501 - protein, 8 aa, Artificial Sequence
  Description of Artificial Sequence: Synthetic Peptide
  SITE (7)..(7): Xaa is C, E, F, H, N, P, S, or W
LGNDISXL

SEQ ID NO: 1502 - protein, 8 aa, Artificial Sequence
  Description of Artificial Sequence: Synthetic Peptide
  SITE (7)..(7): Xaa is C, F, M, Q, W, or Y
LGNDLSXL

SEQ ID NO: 1503 - protein, 8 aa, Artificial Sequence
  Description of Artificial Sequence: Synthetic Peptide
  SITE (7)..(7): Xaa is A, C, D, K, L, M, N, P, Q, V, or Y
LGNEIDXI

SEQ ID NO: 1504 - protein, 8 aa, Artificial Sequence
  Description of Artificial Sequence: Synthetic Peptide
  SITE (7)..(7): Xaa is C, E, F, G, H, M, N, Q, V, or W
LGNELDXI

SEQ ID NO: 1505 - protein, 8 aa, Artificial Sequence
  Description of Artificial Sequence: Synthetic Peptide
  SITE (7)..(7): Xaa is A, C, D, F, H, I, M, N, P, T, V, W, or Y
LGNEIDXL

SEQ ID NO: 1506 - protein, 8 aa, Artificial Sequence
  Description of Artificial Sequence: Synthetic Peptide
  SITE (7)..(7): Xaa is C, I, M, N, Q, S, T, or W
LGNELDXL

SEQ ID NO: 1507 - protein, 8 aa, Artificial Sequence
  Description of Artificial Sequence: Synthetic Peptide
  SITE (7)..(7): Xaa is G, H, I, K, M, P, S, V, or W
LGNELRXI

SEQ ID NO: 1508 - protein, 8 aa, Artificial Sequence
  Description of Artificial Sequence: Synthetic Peptide
  SITE (7)..(7): Xaa is C, E, F, G, M, P, T, V, or W
LGNEIRXL

SEQ ID NO: 1509 - protein, 8 aa, Artificial Sequence
  Description of Artificial Sequence: Synthetic Peptide
  SITE (7)..(7): Xaa is C, M, N, V, or W
LGNELRXL

SEQ ID NO: 1510 - protein, 8 aa, Artificial Sequence
  Description of Artificial Sequence: Synthetic Peptide
  SITE (7)..(7): Xaa is C, E, H, I, or T
LGNEISXI

SEQ ID NO: 1511 - protein, 8 aa, Artificial Sequence
  Description of Artificial Sequence: Synthetic Peptide
  SITE (7)..(7): Xaa is C, H, I, N, Q, S, V, W, or Y
LGNELSXI

SEQ ID NO: 1512 - protein, 8 aa, Artificial Sequence
  Description of Artificial Sequence: Synthetic Peptide
  SITE (7)..(7): Xaa is E, F, M, Q, W, or Y
LGNEISXL

SEQ ID NO: 1513 - protein, 8 aa, Artificial Sequence
  Description of Artificial Sequence: Synthetic Peptide
  SITE (7)..(7): Xaa is C, D, E, H, I, T, W, or Y
LGNELSXL

SEQ ID NO: 1514 - protein, 8 aa, Artificial Sequence
  Description of Artificial Sequence: Synthetic Peptide
  SITE (7)..(7): Xaa is C, F, G, H, I, L, M, N, Q, R, S, or Y
LGNNIDXI

SEQ ID NO: 1515 - protein, 8 aa, Artificial Sequence
  Description of Artificial Sequence: Synthetic Peptide
  SITE (7)..(7): Xaa is A, C ,F, H, K, L, M, P, R, S, T, V, W, or Y
LGNNLDXI

SEQ ID NO: 1516 - protein, 8 aa, Artificial Sequence
  Description of Artificial Sequence: Synthetic Peptide
  SITE (7)..(7): Xaa is C, F, G, H, M, Q, S, V, W, or Y
LGNNIDXL

SEQ ID NO: 1517 - protein, 8 aa, Artificial Sequence
  Description of Artificial Sequence: Synthetic Peptide
  SITE (7)..(7): Xaa is F, G, H, M, R, V, or W
LGNNLDXL

SEQ ID NO: 1518 - protein, 8 aa, Artificial Sequence
  Description of Artificial Sequence: Synthetic Peptide
  SITE (7)..(7): Xaa is A, C, D, G, H, I, L, M, N, P, Q, R, S, V, W, or Y
LGNNIRXI

SEQ ID NO: 1519 - protein, 8 aa, Artificial Sequence
  Description of Artificial Sequence: Synthetic Peptide
  SITE (7)..(7): Xaa is A, C, D, F, G, H, L, Q, R, or W
LGNNLRXI

SEQ ID NO: 1520 - protein, 8 aa, Artificial Sequence
  Description of Artificial Sequence: Synthetic Peptide
  SITE (7)..(7): Xaa is A, C, E, F, G, H, P, Q, R, V, or W
LGNNIRXL

SEQ ID NO: 1521 - protein, 8 aa, Artificial Sequence
  Description of Artificial Sequence: Synthetic Peptide
  SITE (7)..(7): Xaa is C, H, L, N, P, S, V, W, or Y
LGNNLRXL

SEQ ID NO: 1522 - protein, 8 aa, Artificial Sequence
  Description of Artificial Sequence: Synthetic Peptide
  SITE (7)..(7): Xaa is A, C, F, H, I, M, N, P, Q, W, or Y
LGNNISXI

SEQ ID NO: 1523 - protein, 8 aa, Artificial Sequence
  Description of Artificial Sequence: Synthetic Peptide
  SITE (7)..(7): Xaa is A, C, D, F, L, M, N, Q, W, or Y
LGNNLSXI

SEQ ID NO: 1524 - protein, 8 aa, Artificial Sequence
  Description of Artificial Sequence: Synthetic Peptide
  SITE (7)..(7): Xaa is C, F, G, H, M, T, W, or Y
LGNNISXL

SEQ ID NO: 1525 - protein, 8 aa, Artificial Sequence
  Description of Artificial Sequence: Synthetic Peptide
  SITE (7)..(7): Xaa is C, H, K, M, S, or Y
LGNNLSXL

SEQ ID NO: 1526 - protein, 8 aa, Artificial Sequence
  Description of Artificial Sequence: Synthetic Peptide
  SITE (7)..(7): Xaa is C, D, E, F, G, H, I, K, N, P, S, T, or W
LGNQIDXI

SEQ ID NO: 1527 - protein, 8 aa, Artificial Sequence
  Description of Artificial Sequence: Synthetic Peptide
  SITE (7)..(7): Xaa is C, D, E, H, I, M, N, P, Q, S, V, w, or Y
LGNQLDXI

SEQ ID NO: 1528 - protein, 8 aa, Artificial Sequence
  Description of Artificial Sequence: Synthetic Peptide
  SITE (7)..(7): Xaa is C, E, F, H, I, K, L, M, N, P, Q, R, V, W, or Y
LGNQIDXL

SEQ ID NO: 1529 - protein, 8 aa, Artificial Sequence
  Description of Artificial Sequence: Synthetic Peptide
  SITE (7)..(7): Xaa is A, C, F, H, I, K, M, N, Q, W, or Y
LGNQLDXL

SEQ ID NO: 1530 - protein, 8 aa, Artificial Sequence
  Description of Artificial Sequence: Synthetic Peptide
  SITE (7)..(7): Xaa is A, C, F, G, H, I, K, M, N, P, R, V, W, or Y
LGNQIRXI

SEQ ID NO: 1531 - protein, 8 aa, Artificial Sequence
  Description of Artificial Sequence: Synthetic Peptide
  SITE (7)..(7): Xaa is A, C, E, F, G, H, I, M, R, T, V, W, or Y
LGNQLRXI

SEQ ID NO: 1532 - protein, 8 aa, Artificial Sequence
  Description of Artificial Sequence: Synthetic Peptide
  SITE (7)..(7): Xaa is C, D, F, H, L, M, N, Q, W, or Y
LGNQIRXL

SEQ ID NO: 1533 - protein, 8 aa, Artificial Sequence
  Description of Artificial Sequence: Synthetic Peptide
  SITE (7)..(7): Xaa is C, D, G, M, N, P, T, V, or Y
LGNQLRXL

SEQ ID NO: 1534 - protein, 8 aa, Artificial Sequence
  Description of Artificial Sequence: Synthetic Peptide
  SITE (7)..(7): Xaa is C, D, E, G, H, I, K, L, M, P,Q, S, T, V, W, or Y
LGNQISXI

SEQ ID NO: 1535 - protein, 8 aa, Artificial Sequence
  Description of Artificial Sequence: Synthetic Peptide
  SITE (7)..(7): Xaa is A, C, D, H, I, K, M, N, P, T, W, or Y
LGNQLSXI

SEQ ID NO: 1536 - protein, 8 aa, Artificial Sequence
  Description of Artificial Sequence: Synthetic Peptide
  SITE (7)..(7): Xaa is C, I, M, N, P, S, T, or Y
LGNQISXL

SEQ ID NO: 1537 - protein, 8 aa, Artificial Sequence
  Description of Artificial Sequence: Synthetic Peptide
  SITE (7)..(7): Xaa is C, H, I, K, L, M, N, P, Q, V, W, or Y
LGNQLSXL

SEQ ID NO: 1538 - protein, 8 aa, Artificial Sequence
  Description of Artificial Sequence: Synthetic Peptide
  SITE (7)..(7): Xaa is F, I, L, M, N, S, T, or W
LGNSIDXI

SEQ ID NO: 1539 - protein, 8 aa, Artificial Sequence
  Description of Artificial Sequence: Synthetic Peptide
  SITE (7)..(7): Xaa is C, D, I, M, N, Q, W, or Y
LGNSLDXI

SEQ ID NO: 1540 - protein, 8 aa, Artificial Sequence
  Description of Artificial Sequence: Synthetic Peptide
  SITE (7)..(7): Xaa is C, E, F, H, I, K, Q, R, S, or Y
LGNSIDXL

SEQ ID NO: 1541 - protein, 8 aa, Artificial Sequence
  Description of Artificial Sequence: Synthetic Peptide
  SITE (7)..(7): Xaa is C, G, M, W, or Y
LGNSLDXL

SEQ ID NO: 1542 - protein, 8 aa, Artificial Sequence
  Description of Artificial Sequence: Synthetic Peptide
  SITE (7)..(7): Xaa is A, C, D, G, H, I, L, M, V, or W
LGNSIRXI

SEQ ID NO: 1543 - protein, 8 aa, Artificial Sequence
  Description of Artificial Sequence: Synthetic Peptide
  SITE (7)..(7): Xaa is C, E, G, H, I, L, N, P, Q, or S
LGNSLRXI

SEQ ID NO: 1544 - protein, 8 aa, Artificial Sequence
  Description of Artificial Sequence: Synthetic Peptide
  SITE (7)..(7): Xaa is A, C, F, G, M, N, P, S, or W
LGNSIRXL

SEQ ID NO: 1545 - protein, 8 aa, Artificial Sequence
  Description of Artificial Sequence: Synthetic Peptide
  SITE (7)..(7): Xaa is C, H, N, or W
LGNSLRXL

SEQ ID NO: 1546 - protein, 8 aa, Artificial Sequence
  Description of Artificial Sequence: Synthetic Peptide
  SITE (7)..(7): Xaa is A, C, F, H, K, M, R, W, or Y
LGNSISXI

SEQ ID NO: 1547 - protein, 8 aa, Artificial Sequence
  Description of Artificial Sequence: Synthetic Peptide
  SITE (7)..(7): Xaa is D, H, or R
LGNSLSXI

SEQ ID NO: 1548 - protein, 8 aa, Artificial Sequence
  Description of Artificial Sequence: Synthetic Peptide
  SITE (7)..(7): Xaa is C, H, M, or W
LGNSISXL

SEQ ID NO: 1549 - protein, 8 aa, Artificial Sequence
  Description of Artificial Sequence: Synthetic Peptide
  SITE (7)..(7): Xaa is H, Q, S, or W
LGNSLSXL

SEQ ID NO: 1550 - protein, 8 aa, Artificial Sequence
  Description of Artificial Sequence: Synthetic Peptide
  SITE (7)..(7): Xaa is H, M, N, P, R, or V
LGSDIDXI

SEQ ID NO: 1551 - protein, 8 aa, Artificial Sequence
  Description of Artificial Sequence: Synthetic Peptide
  SITE (7)..(7): Xaa is D, F, H, I, V, W, or Y
LGSDLDXI

SEQ ID NO: 1552 - protein, 8 aa, Artificial Sequence
  Description of Artificial Sequence: Synthetic Peptide
  SITE (7)..(7): Xaa is A, E, P, W, or Y
LGSDIDXL

SEQ ID NO: 1553 - protein, 8 aa, Artificial Sequence
  Description of Artificial Sequence: Synthetic Peptide
  SITE (7)..(7): Xaa is C, D, H, W, or Y
LGSDLDXL

SEQ ID NO: 1554 - protein, 8 aa, Artificial Sequence
  Description of Artificial Sequence: Synthetic Peptide
  SITE (7)..(7): Xaa is C, K, M, P, R, S, W, or Y
LGSDIRXI

SEQ ID NO: 1555 - protein, 8 aa, Artificial Sequence
  Description of Artificial Sequence: Synthetic Peptide
  SITE (7)..(7): Xaa is C, D, F, H, T, or W
LGSDLRXI

SEQ ID NO: 1556 - protein, 8 aa, Artificial Sequence
  Description of Artificial Sequence: Synthetic Peptide
  SITE (7)..(7): Xaa is H, I, K, L, M, T, W, or Y
LGSDIRXL

SEQ ID NO: 1557 - protein, 8 aa, Artificial Sequence
  Description of Artificial Sequence: Synthetic Peptide
  SITE (7)..(7): Xaa is C, H, or W
LGSDLRXL

SEQ ID NO: 1558 - protein, 8 aa, Artificial Sequence
  Description of Artificial Sequence: Synthetic Peptide
  SITE (7)..(7): Xaa is A, C, L, M, N, P, Q, S, T, or W
LGSDISXI

SEQ ID NO: 1559 - protein, 8 aa, Artificial Sequence
  Description of Artificial Sequence: Synthetic Peptide
  SITE (7)..(7): Xaa is C, E, H, I, K, M, N, W, or Y
LGSDLSXI

SEQ ID NO: 1560 - protein, 8 aa, Artificial Sequence
  Description of Artificial Sequence: Synthetic Peptide
  SITE (7)..(7): Xaa is C, F, M, or P
LGSDISXL

SEQ ID NO: 1561 - protein, 8 aa, Artificial Sequence
  Description of Artificial Sequence: Synthetic Peptide
  SITE (7)..(7): Xaa is C, F, P, T, W, or Y
LGSDLSXL

SEQ ID NO: 1562 - protein, 8 aa, Artificial Sequence
  Description of Artificial Sequence: Synthetic Peptide
  SITE (7)..(7): Xaa is A, C, F, H, K, L, or S
LGSEIDXI

SEQ ID NO: 1563 - protein, 8 aa, Artificial Sequence
  Description of Artificial Sequence: Synthetic Peptide
  SITE (7)..(7): Xaa is C, E, H, K, M, N, T, or W
LGSELDXI

SEQ ID NO: 1564 - protein, 8 aa, Artificial Sequence
  Description of Artificial Sequence: Synthetic Peptide
  SITE (7)..(7): Xaa is F, H, P, V, or W
LGSEIDXL

SEQ ID NO: 1565 - protein, 8 aa, Artificial Sequence
  Description of Artificial Sequence: Synthetic Peptide
  SITE (7)..(7): Xaa is H, M, N, S, W, or Y
LGSELDXL

SEQ ID NO: 1566 - protein, 8 aa, Artificial Sequence
  Description of Artificial Sequence: Synthetic Peptide
  SITE (7)..(7): Xaa is C, D, H, I, L, M, P, W, or Y
LGSEIRXI

SEQ ID NO: 1567 - protein, 8 aa, Artificial Sequence
  Description of Artificial Sequence: Synthetic Peptide
  SITE (7)..(7): Xaa is C, H, M, W, or Y
LGSELRXI

SEQ ID NO: 1568 - protein, 8 aa, Artificial Sequence
  Description of Artificial Sequence: Synthetic Peptide
  SITE (7)..(7): Xaa is M, N, W, or Y
LGSEIRXL

SEQ ID NO: 1569 - protein, 8 aa, Artificial Sequence
  Description of Artificial Sequence: Synthetic Peptide
  SITE (7)..(7): Xaa is C, F, I, or W
LGSELRXL

SEQ ID NO: 1570 - protein, 8 aa, Artificial Sequence
  Description of Artificial Sequence: Synthetic Peptide
  SITE (7)..(7): Xaa is D, H, L, M, N, P, or W
LGSEISXI

SEQ ID NO: 1571 - protein, 8 aa, Artificial Sequence
  Description of Artificial Sequence: Synthetic Peptide
  SITE (7)..(7): Xaa is C, F, H, M, P, S, or W
LGSELSXI

SEQ ID NO: 1572 - protein, 8 aa, Artificial Sequence
  Description of Artificial Sequence: Synthetic Peptide
  SITE (7)..(7): Xaa is D, H, M, N, Q, T, or W
LGSEISXL

SEQ ID NO: 1573 - protein, 8 aa, Artificial Sequence
  Description of Artificial Sequence: Synthetic Peptide
  SITE (7)..(7): Xaa is M, or W
LGSELSXL

SEQ ID NO: 1574 - protein, 8 aa, Artificial Sequence
  Description of Artificial Sequence: Synthetic Peptide
  SITE (7)..(7): Xaa is A, C, F, G, I, P, S, V, or W
LGSNIDXI

SEQ ID NO: 1575 - protein, 8 aa, Artificial Sequence
  Description of Artificial Sequence: Synthetic Peptide
  SITE (7)..(7): Xaa is C, D, F, I, K, M, N, P, T, V, W, or Y
LGSNLDXI

SEQ ID NO: 1576 - protein, 8 aa, Artificial Sequence
  Description of Artificial Sequence: Synthetic Peptide
  SITE (7)..(7): Xaa is C, D, E, F, H, N, P, W, or Y
LGSNIDXL

SEQ ID NO: 1577 - protein, 8 aa, Artificial Sequence
  Description of Artificial Sequence: Synthetic Peptide
  SITE (7)..(7): Xaa is H, I, K, or N
LGSNLDXL

SEQ ID NO: 1578 - protein, 8 aa, Artificial Sequence
  Description of Artificial Sequence: Synthetic Peptide
  SITE (7)..(7): Xaa is A, C, E, F, H, L, M, Q, S, V, W, or Y
LGSNIRXI

SEQ ID NO: 1579 - protein, 8 aa, Artificial Sequence
  Description of Artificial Sequence: Synthetic Peptide
  SITE (7)..(7): Xaa is F, G, or Y
LGSNISXI

SEQ ID NO: 1580 - protein, 8 aa, Artificial Sequence
  Description of Artificial Sequence: Synthetic Peptide
  SITE (7)..(7): Xaa is C, H, L, R, or T
LGSNLSXI

SEQ ID NO: 1581 - protein, 8 aa, Artificial Sequence
  Description of Artificial Sequence: Synthetic Peptide
  SITE (7)..(7): Xaa is C, D, F, H, M, or P
LGSNISXL

SEQ ID NO: 1582 - protein, 8 aa, Artificial Sequence
  Description of Artificial Sequence: Synthetic Peptide
  SITE (7)..(7): Xaa is H, K, M, N, P, or Q
LGSNLSXL

SEQ ID NO: 1583 - protein, 8 aa, Artificial Sequence
  Description of Artificial Sequence: Synthetic Peptide
  SITE (7)..(7): Xaa is C, D, E, F, H, K, M, P, R, T, V, or Y
LGSQIDXI

SEQ ID NO: 1584 - protein, 8 aa, Artificial Sequence
  Description of Artificial Sequence: Synthetic Peptide
  SITE (7)..(7): Xaa is H, K, L, M, P, W, or Y
LGSQLDXI

SEQ ID NO: 1585 - protein, 8 aa, Artificial Sequence
  Description of Artificial Sequence: Synthetic Peptide
  SITE (7)..(7): Xaa is C, D, E, F, G, H, M, N, W, or Y
LGSQIDXL

SEQ ID NO: 1586 - protein, 8 aa, Artificial Sequence
  Description of Artificial Sequence: Synthetic Peptide
  SITE (7)..(7): Xaa is H, L, M, W, or Y
LGSQLDXL

SEQ ID NO: 1587 - protein, 8 aa, Artificial Sequence
  Description of Artificial Sequence: Synthetic Peptide
  SITE (7)..(7): Xaa is A, C, F, G, H, I, K, M, R, S, T, V, or W
LGSQIRXI

SEQ ID NO: 1588 - protein, 8 aa, Artificial Sequence
  Description of Artificial Sequence: Synthetic Peptide
  SITE (7)..(7): Xaa is A, C, F, H, I, K, L, M, P, S, T, V, or W
LGSQLRXI

SEQ ID NO: 1589 - protein, 8 aa, Artificial Sequence
  Description of Artificial Sequence: Synthetic Peptide
  SITE (7)..(7): Xaa is A, C, E, F, G, H, I, K, M, N, P, S, or W
LGSQIRXL

SEQ ID NO: 1590 - protein, 8 aa, Artificial Sequence
  Description of Artificial Sequence: Synthetic Peptide
  SITE (7)..(7): Xaa is F, H, M, N, W, or Y
LGSQLRXL

SEQ ID NO: 1591 - protein, 8 aa, Artificial Sequence
  Description of Artificial Sequence: Synthetic Peptide
  SITE (7)..(7): Xaa is C, D, F, H, P, Q, R, or W
LGSQISXI

SEQ ID NO: 1592 - protein, 8 aa, Artificial Sequence
  Description of Artificial Sequence: Synthetic Peptide
  SITE (7)..(7): Xaa is C, D, G, H, I, or W
LGSQLSXI

SEQ ID NO: 1593 - protein, 8 aa, Artificial Sequence
  Description of Artificial Sequence: Synthetic Peptide
  SITE (7)..(7): Xaa is C, H, I, K, N, P, R, S, V, or W
LGSQISXL

SEQ ID NO: 1594 - protein, 8 aa, Artificial Sequence
  Description of Artificial Sequence: Synthetic Peptide
  SITE (7)..(7): Xaa is C, F, H, N, W, or Y
LGSQLSXL

SEQ ID NO: 1595 - protein, 8 aa, Artificial Sequence
  Description of Artificial Sequence: Synthetic Peptide
  SITE (7)..(7): Xaa is C, D, F, H, I, M, P, T, or W
LGSSIDXI

SEQ ID NO: 1596 - protein, 8 aa, Artificial Sequence
  Description of Artificial Sequence: Synthetic Peptide
  SITE (7)..(7): Xaa is C, F, I, P, T, W, or Y
LGSSLDXI

SEQ ID NO: 1597 - protein, 8 aa, Artificial Sequence
  Description of Artificial Sequence: Synthetic Peptide
  SITE (7)..(7): Xaa is C, E, M, or Y
LGSSIDXL

SEQ ID NO: 1598 - protein, 8 aa, Artificial Sequence
  Description of Artificial Sequence: Synthetic Peptide
  SITE (7)..(7): Xaa is M, or Y
LGSSLDXL

SEQ ID NO: 1599 - protein, 8 aa, Artificial Sequence
  Description of Artificial Sequence: Synthetic Peptide
  SITE (7)..(7): Xaa is A, C, F, G, H, L, M, N, or Q
LGSSIRXI

SEQ ID NO: 1600 - protein, 8 aa, Artificial Sequence
  Description of Artificial Sequence: Synthetic Peptide
  SITE (7)..(7): Xaa is C, F, H, I, M, or W
LGSSLRXI

SEQ ID NO: 1601 - protein, 8 aa, Artificial Sequence
  Description of Artificial Sequence: Synthetic Peptide
  SITE (7)..(7): Xaa is C, D, F, H, P, R, or W
LGSSIRXL

SEQ ID NO: 1602 - protein, 8 aa, Artificial Sequence
  Description of Artificial Sequence: Synthetic Peptide
  SITE (7)..(7): Xaa is C or M
LGSSLRXL

SEQ ID NO: 1603 - protein, 8 aa, Artificial Sequence
  Description of Artificial Sequence: Synthetic Peptide
  SITE (7)..(7): Xaa is C, H, K, P, or Q
LGSSISXI

SEQ ID NO: 1604 - protein, 8 aa, Artificial Sequence
  Description of Artificial Sequence: Synthetic Peptide
  SITE (7)..(7): Xaa is C or H
LGSSLSXI

SEQ ID NO: 1605 - protein, 8 aa, Artificial Sequence
  Description of Artificial Sequence: Synthetic Peptide
  SITE (7)..(7): Xaa is C or W
LGSSISXL

SEQ ID NO: 1606 - protein, 8 aa, Artificial Sequence
  Description of Artificial Sequence: Synthetic Peptide
LGSSLSCL

SEQ ID NO: 1607 - protein, 8 aa, Artificial Sequence
  Description of Artificial Sequence: Synthetic Peptide
  SITE (7)..(7): Xaa is C, D, E, G, H, I, K, M, Q, W, or Y
LKADIDXI

SEQ ID NO: 1608 - protein, 8 aa, Artificial Sequence
  Description of Artificial Sequence: Synthetic Peptide
  SITE (7)..(7): Xaa is C, M, N, or W
LKADLDXI

SEQ ID NO: 1609 - protein, 8 aa, Artificial Sequence
  Description of Artificial Sequence: Synthetic Peptide
  SITE (7)..(7): Xaa is F or M
LKADIDXL

SEQ ID NO: 1610 - protein, 8 aa, Artificial Sequence
  Description of Artificial Sequence: Synthetic Peptide
LKADLDCL

SEQ ID NO: 1611 - protein, 8 aa, Artificial Sequence
  Description of Artificial Sequence: Synthetic Peptide
  SITE (7)..(7): Xaa is C, D, E, G, H, K, M, N, Q, R, S, or W
LKADIRXI

SEQ ID NO: 1612 - protein, 8 aa, Artificial Sequence
  Description of Artificial Sequence: Synthetic Peptide
  SITE (7)..(7): Xaa is F, H, I, Q, R, or W
LKADLRXI

SEQ ID NO: 1613 - protein, 8 aa, Artificial Sequence
  Description of Artificial Sequence: Synthetic Peptide
  SITE (7)..(7): Xaa is C, H, Q, V, W, or Y
LKADIRXL

SEQ ID NO: 1614 - protein, 8 aa, Artificial Sequence
  Description of Artificial Sequence: Synthetic Peptide
  SITE (7)..(7): Xaa is C, H, M, N, or W
LKADLRXL

SEQ ID NO: 1615 - protein, 8 aa, Artificial Sequence
  Description of Artificial Sequence: Synthetic Peptide
  SITE (7)..(7): Xaa is C, F, H, M ,T ,W ,or Y
LKADISXI

SEQ ID NO: 1616 - protein, 8 aa, Artificial Sequence
  Description of Artificial Sequence: Synthetic Peptide
  SITE (7)..(7): Xaa is A, C, H, M, P, Q, W, or Y
LKADLSXI

SEQ ID NO: 1617 - protein, 8 aa, Artificial Sequence
  Description of Artificial Sequence: Synthetic Peptide
  SITE (7)..(7): Xaa is C, M, P, or W
LKADISXL

SEQ ID NO: 1618 - protein, 8 aa, Artificial Sequence
  Description of Artificial Sequence: Synthetic Peptide
  SITE (7)..(7): Xaa is C, R, or W
LKADLSXL

SEQ ID NO: 1619 - protein, 8 aa, Artificial Sequence
  Description of Artificial Sequence: Synthetic Peptide
  SITE (7)..(7): Xaa is C, I, L, M, W, or Y
LKAEIDXI

SEQ ID NO: 1620 - protein, 8 aa, Artificial Sequence
  Description of Artificial Sequence: Synthetic Peptide
LKAELDYI

SEQ ID NO: 1621 - protein, 8 aa, Artificial Sequence
  Description of Artificial Sequence: Synthetic Peptide
  SITE (7)..(7): Xaa is C, F, or P
LKAEIDXL

SEQ ID NO: 1622 - protein, 8 aa, Artificial Sequence
  Description of Artificial Sequence: Synthetic Peptide
LKAELDPL

SEQ ID NO: 1623 - protein, 8 aa, Artificial Sequence
  Description of Artificial Sequence: Synthetic Peptide
  SITE (7)..(7): Xaa is C, F, H, I, L, M, W, or Y
LKAEIRXI

SEQ ID NO: 1624 - protein, 8 aa, Artificial Sequence
  Description of Artificial Sequence: Synthetic Peptide
  SITE (7)..(7): Xaa is C, L, M, V, or W
LKAELRXI

SEQ ID NO: 1625 - protein, 8 aa, Artificial Sequence
  Description of Artificial Sequence: Synthetic Peptide
  SITE (7)..(7): Xaa is H, I, L, M, V, W, or Y
LKAEIRXL

SEQ ID NO: 1626 - protein, 8 aa, Artificial Sequence
  Description of Artificial Sequence: Synthetic Peptide
  SITE (7)..(7): Xaa is F, H, M, or W
LKAELRXL

SEQ ID NO: 1627 - protein, 8 aa, Artificial Sequence
  Description of Artificial Sequence: Synthetic Peptide
  SITE (7)..(7): Xaa is C, F, H, M, V, or W
LKAEISXI

SEQ ID NO: 1628 - protein, 8 aa, Artificial Sequence
  Description of Artificial Sequence: Synthetic Peptide
  SITE (7)..(7): Xaa is C, M, P, V, or W
LKAELSXI

SEQ ID NO: 1629 - protein, 8 aa, Artificial Sequence
  Description of Artificial Sequence: Synthetic Peptide
  SITE (7)..(7): Xaa is C, F, I, M, W, or Y
LKAEISXL

SEQ ID NO: 1630 - protein, 8 aa, Artificial Sequence
  Description of Artificial Sequence: Synthetic Peptide
  SITE (7)..(7): Xaa is C, W, or Y
LKAELSXL

SEQ ID NO: 1631 - protein, 8 aa, Artificial Sequence
  Description of Artificial Sequence: Synthetic Peptide
  SITE (7)..(7): Xaa is C, D, E, G, H, I, M, Q, T, or V
LKANIDXI

SEQ ID NO: 1632 - protein, 8 aa, Artificial Sequence
  Description of Artificial Sequence: Synthetic Peptide
  SITE (7)..(7): Xaa is C, I, M, or W
LKANLDXI

SEQ ID NO: 1633 - protein, 8 aa, Artificial Sequence
  Description of Artificial Sequence: Synthetic Peptide
  SITE (7)..(7): Xaa is C, F, H, M, W, or Y
LKANIDXL

SEQ ID NO: 1634 - protein, 8 aa, Artificial Sequence
  Description of Artificial Sequence: Synthetic Peptide
  SITE (7)..(7): Xaa is M or W
LKANLDXL

SEQ ID NO: 1635 - protein, 8 aa, Artificial Sequence
  Description of Artificial Sequence: Synthetic Peptide
  SITE (7)..(7): Xaa is A, C, D, H, K, M, P, Q, R, T, or W
LKANIRXI

SEQ ID NO: 1636 - protein, 8 aa, Artificial Sequence
  Description of Artificial Sequence: Synthetic Peptide
  SITE (7)..(7): Xaa is C, G, M, N, Q, R, S, T, V, W, or Y
LKANLRXI

SEQ ID NO: 1637 - protein, 8 aa, Artificial Sequence
  Description of Artificial Sequence: Synthetic Peptide
  SITE (7)..(7): Xaa is A, C, H, M, P, R, V, W, or Y
LKANIRXL

SEQ ID NO: 1638 - protein, 8 aa, Artificial Sequence
  Description of Artificial Sequence: Synthetic Peptide
  SITE (7)..(7): Xaa is C, F, H, K, M, R, W, or Y
LKANLRXL

SEQ ID NO: 1639 - protein, 8 aa, Artificial Sequence
  Description of Artificial Sequence: Synthetic Peptide
  SITE (7)..(7): Xaa is C, F, G, H, W, or Y
LKANLSXI

SEQ ID NO: 1640 - protein, 8 aa, Artificial Sequence
  Description of Artificial Sequence: Synthetic Peptide
  SITE (7)..(7): Xaa is E, I, or P
LKANISXL

SEQ ID NO: 1641 - protein, 8 aa, Artificial Sequence
  Description of Artificial Sequence: Synthetic Peptide
  SITE (7)..(7): Xaa is G, H, M, or Y
LKANLSXL

SEQ ID NO: 1642 - protein, 8 aa, Artificial Sequence
  Description of Artificial Sequence: Synthetic Peptide
  SITE (7)..(7): Xaa is C, H, I, N, P, or Y
LKAQIDXI

SEQ ID NO: 1643 - protein, 8 aa, Artificial Sequence
  Description of Artificial Sequence: Synthetic Peptide
  SITE (7)..(7): Xaa is C, F, M, W, or Y
LKAQLDXI

SEQ ID NO: 1644 - protein, 8 aa, Artificial Sequence
  Description of Artificial Sequence: Synthetic Peptide
  SITE (7)..(7): Xaa is F, M, or P
LKAQIDXL

SEQ ID NO: 1645 - protein, 8 aa, Artificial Sequence
  Description of Artificial Sequence: Synthetic Peptide
  SITE (7)..(7): Xaa is C or F
LKAQLDXL

SEQ ID NO: 1646 - protein, 8 aa, Artificial Sequence
  Description of Artificial Sequence: Synthetic Peptide
  SITE (7)..(7): Xaa is C, G, H, I, K, M, Q, R, T, V, W, or Y
LKAQIRXI

SEQ ID NO: 1647 - protein, 8 aa, Artificial Sequence
  Description of Artificial Sequence: Synthetic Peptide
  SITE (7)..(7): Xaa is C, D, F, H, I, L, M, T, or W
LKAQLRXI

SEQ ID NO: 1648 - protein, 8 aa, Artificial Sequence
  Description of Artificial Sequence: Synthetic Peptide
  SITE (7)..(7): Xaa is C, F, I, L, M, P, R, S, W, or Y
LKAQIRXL

SEQ ID NO: 1649 - protein, 8 aa, Artificial Sequence
  Description of Artificial Sequence: Synthetic Peptide
  SITE (7)..(7): Xaa is C, I, L, W, or Y
LKAQLRXL

SEQ ID NO: 1650 - protein, 8 aa, Artificial Sequence
  Description of Artificial Sequence: Synthetic Peptide
  SITE (7)..(7): Xaa is C, I, P, R, V, or W
LKAQISXI

SEQ ID NO: 1651 - protein, 8 aa, Artificial Sequence
  Description of Artificial Sequence: Synthetic Peptide
  SITE (7)..(7): Xaa is C, F, G, H, P, W, or Y
LKAQLSXI

SEQ ID NO: 1652 - protein, 8 aa, Artificial Sequence
  Description of Artificial Sequence: Synthetic Peptide
  SITE (7)..(7): Xaa is C, H, M, W, or Y
LKAQISXL

SEQ ID NO: 1653 - protein, 8 aa, Artificial Sequence
  Description of Artificial Sequence: Synthetic Peptide
  SITE (7)..(7): Xaa is F, I, M, P, W, or Y
LKAQLSXL

SEQ ID NO: 1654 - protein, 8 aa, Artificial Sequence
  Description of Artificial Sequence: Synthetic Peptide
  SITE (7)..(7): Xaa is C, E, F, H, I, L, P, T, V, or W
LKASIDXI

SEQ ID NO: 1655 - protein, 8 aa, Artificial Sequence
  Description of Artificial Sequence: Synthetic Peptide
  SITE (7)..(7): Xaa is F, I, M, P, or W
LKASLDXI

SEQ ID NO: 1656 - protein, 8 aa, Artificial Sequence
  Description of Artificial Sequence: Synthetic Peptide
  SITE (7)..(7): Xaa is I  or W
LKASIDXL

SEQ ID NO: 1657 - protein, 8 aa, Artificial Sequence
  Description of Artificial Sequence: Synthetic Peptide
LKASLDPL

SEQ ID NO: 1658 - protein, 8 aa, Artificial Sequence
  Description of Artificial Sequence: Synthetic Peptide
  SITE (7)..(7): Xaa is C, F, H, I, M, P, Q, R, V, or W
LKASIRXI

SEQ ID NO: 1659 - protein, 8 aa, Artificial Sequence
  Description of Artificial Sequence: Synthetic Peptide
  SITE (7)..(7): Xaa is C, F, I, L, P, W, V, or Y
LKASLRXI

SEQ ID NO: 1660 - protein, 8 aa, Artificial Sequence
  Description of Artificial Sequence: Synthetic Peptide
  SITE (7)..(7): Xaa is C, H, I, M Q, E, or W
LKASIRXL

SEQ ID NO: 1661 - protein, 8 aa, Artificial Sequence
  Description of Artificial Sequence: Synthetic Peptide
  SITE (7)..(7): Xaa is C, M, or V
LKASLRXL

SEQ ID NO: 1662 - protein, 8 aa, Artificial Sequence
  Description of Artificial Sequence: Synthetic Peptide
  SITE (7)..(7): Xaa is C, H, I, K, L, N, R, V, W, or Y
LKASISXI

SEQ ID NO: 1663 - protein, 8 aa, Artificial Sequence
  Description of Artificial Sequence: Synthetic Peptide
  SITE (7)..(7): Xaa is C, F, H, M, V, or W
LKASLSXI

SEQ ID NO: 1664 - protein, 8 aa, Artificial Sequence
  Description of Artificial Sequence: Synthetic Peptide
  SITE (7)..(7): Xaa is L or W
LKASISXL

SEQ ID NO: 1665 - protein, 8 aa, Artificial Sequence
  Description of Artificial Sequence: Synthetic Peptide
  SITE (7)..(7): Xaa is M or Y
LKASLSXL

SEQ ID NO: 1666 - protein, 8 aa, Artificial Sequence
  Description of Artificial Sequence: Synthetic Peptide
  SITE (7)..(7): Xaa is C, D, F, H, I, M, P, Q, R, T, W, or Y
LKGDIDXI

SEQ ID NO: 1667 - protein, 8 aa, Artificial Sequence
  Description of Artificial Sequence: Synthetic Peptide
  SITE (7)..(7): Xaa is E, H, M, N, W, or Y
LKGDLDXI

SEQ ID NO: 1668 - protein, 8 aa, Artificial Sequence
  Description of Artificial Sequence: Synthetic Peptide
  SITE (7)..(7): Xaa is C, W, or Y
LKGDIDXL

SEQ ID NO: 1669 - protein, 8 aa, Artificial Sequence
  Description of Artificial Sequence: Synthetic Peptide
  SITE (7)..(7): Xaa is C, F, H, I, N, P, or W
LKGDLDXL

SEQ ID NO: 1670 - protein, 8 aa, Artificial Sequence
  Description of Artificial Sequence: Synthetic Peptide
  SITE (7)..(7): Xaa is A, C, F, H, I, M, Q, S, T, V, W, or Y
LKGDIRXI

SEQ ID NO: 1671 - protein, 8 aa, Artificial Sequence
  Description of Artificial Sequence: Synthetic Peptide
  SITE (7)..(7): Xaa is C, F, I, K, M, Q, V, or W
LKGDLRXI

SEQ ID NO: 1672 - protein, 8 aa, Artificial Sequence
  Description of Artificial Sequence: Synthetic Peptide
  SITE (7)..(7): Xaa is C, G, M, or W
LKGDIRXL

SEQ ID NO: 1673 - protein, 8 aa, Artificial Sequence
  Description of Artificial Sequence: Synthetic Peptide
  SITE (7)..(7): Xaa is C, F, G, W, or Y
LKGDLRXL

SEQ ID NO: 1674 - protein, 8 aa, Artificial Sequence
  Description of Artificial Sequence: Synthetic Peptide
  SITE (7)..(7): Xaa is A, C, H, P, W, or Y
LKGDISXI

SEQ ID NO: 1675 - protein, 8 aa, Artificial Sequence
  Description of Artificial Sequence: Synthetic Peptide
  SITE (7)..(7): Xaa is C, D, E, F, H, P, W, or Y
LKGDLSXI

SEQ ID NO: 1676 - protein, 8 aa, Artificial Sequence
  Description of Artificial Sequence: Synthetic Peptide
  SITE (7)..(7): Xaa is C, M, Q, W, or Y
LKGDISXL

SEQ ID NO: 1677 - protein, 8 aa, Artificial Sequence
  Description of Artificial Sequence: Synthetic Peptide
  SITE (7)..(7): Xaa is C, M, W, or Y
LKGDLSXL

SEQ ID NO: 1678 - protein, 8 aa, Artificial Sequence
  Description of Artificial Sequence: Synthetic Peptide
  SITE (7)..(7): Xaa is C, D, or W
LKGEIDXI

SEQ ID NO: 1679 - protein, 8 aa, Artificial Sequence
  Description of Artificial Sequence: Synthetic Peptide
  SITE (7)..(7): Xaa is C, D, N, W, or Y
LKGELDXI

SEQ ID NO: 1680 - protein, 8 aa, Artificial Sequence
  Description of Artificial Sequence: Synthetic Peptide
LKGEIDWL

SEQ ID NO: 1681 - protein, 8 aa, Artificial Sequence
  Description of Artificial Sequence: Synthetic Peptide
LKGELDWL

SEQ ID NO: 1682 - protein, 8 aa, Artificial Sequence
  Description of Artificial Sequence: Synthetic Peptide
  SITE (7)..(7): Xaa is D, G, H, I, L, M, W, or Y
LKGEIRXI

SEQ ID NO: 1683 - protein, 8 aa, Artificial Sequence
  Description of Artificial Sequence: Synthetic Peptide
  SITE (7)..(7): Xaa is C, H, I, K, M, Q, V, W, or Y
LKGELRXI

SEQ ID NO: 1684 - protein, 8 aa, Artificial Sequence
  Description of Artificial Sequence: Synthetic Peptide
  SITE (7)..(7): Xaa is C, D, H, I, M, N, or W
LKGEIRXL

SEQ ID NO: 1685 - protein, 8 aa, Artificial Sequence
  Description of Artificial Sequence: Synthetic Peptide
  SITE (7)..(7): Xaa is C, H, M, Q, V, or W
LKGELRXL

SEQ ID NO: 1686 - protein, 8 aa, Artificial Sequence
  Description of Artificial Sequence: Synthetic Peptide
  SITE (7)..(7): Xaa is C, M, P, Q, V, W, and Y
LKGEISXI

SEQ ID NO: 1687 - protein, 8 aa, Artificial Sequence
  Description of Artificial Sequence: Synthetic Peptide
  SITE (7)..(7): Xaa is C, F, I, M, P, Q, W, and Y
LKGELSXI

SEQ ID NO: 1688 - protein, 8 aa, Artificial Sequence
  Description of Artificial Sequence: Synthetic Peptide
  SITE (7)..(7): Xaa is C, W, and Y
LKGEISXL

SEQ ID NO: 1689 - protein, 8 aa, Artificial Sequence
  Description of Artificial Sequence: Synthetic Peptide
  SITE (7)..(7): Xaa is C, F, and Y
LKGELSXL

SEQ ID NO: 1690 - protein, 8 aa, Artificial Sequence
  Description of Artificial Sequence: Synthetic Peptide
  SITE (7)..(7): Xaa is C, F, H, L, M, P, Q, V, or W
LKGNIDXI

SEQ ID NO: 1691 - protein, 8 aa, Artificial Sequence
  Description of Artificial Sequence: Synthetic Peptide
  SITE (7)..(7): Xaa is H, M, N, P, R, S, T, V, or Y
LKGNLDXI

SEQ ID NO: 1692 - protein, 8 aa, Artificial Sequence
  Description of Artificial Sequence: Synthetic Peptide
  SITE (7)..(7): Xaa is C, H, R, W, or Y
LKGNIDXL

SEQ ID NO: 1693 - protein, 8 aa, Artificial Sequence
  Description of Artificial Sequence: Synthetic Peptide
  SITE (7)..(7): Xaa is C, H, Q, V, W, or Y
LKGNLDXL

SEQ ID NO: 1694 - protein, 8 aa, Artificial Sequence
  Description of Artificial Sequence: Synthetic Peptide
  SITE (7)..(7): Xaa is C, G, H, I, M, N, P, Q, W, or Y
LKGNIRXI

SEQ ID NO: 1695 - protein, 8 aa, Artificial Sequence
  Description of Artificial Sequence: Synthetic Peptide
  SITE (7)..(7): Xaa is C, E, F, H, L, P, or W
LKGNLRXI

SEQ ID NO: 1696 - protein, 8 aa, Artificial Sequence
  Description of Artificial Sequence: Synthetic Peptide
  SITE (7)..(7): Xaa is A, C, G, K, N, R, S, T, or W
LKGNIRXL

SEQ ID NO: 1697 - protein, 8 aa, Artificial Sequence
  Description of Artificial Sequence: Synthetic Peptide
  SITE (7)..(7): Xaa is C, M, V, W, or Y
LKGNLRXL

SEQ ID NO: 1698 - protein, 8 aa, Artificial Sequence
  Description of Artificial Sequence: Synthetic Peptide
  SITE (7)..(7): Xaa is C, E, H, I, K, M, or N
LKGNISXI

SEQ ID NO: 1699 - protein, 8 aa, Artificial Sequence
  Description of Artificial Sequence: Synthetic Peptide
  SITE (7)..(7): Xaa is C, F, M, N, Q, T, or W
LKGNLSXI

SEQ ID NO: 1700 - protein, 8 aa, Artificial Sequence
  Description of Artificial Sequence: Synthetic Peptide
  SITE (7)..(7): Xaa is C, or W
LKGNISXL

SEQ ID NO: 1701 - protein, 8 aa, Artificial Sequence
  Description of Artificial Sequence: Synthetic Peptide
  SITE (7)..(7): Xaa is C, M, T, W, or Y
LKGNLSXL

SEQ ID NO: 1702 - protein, 8 aa, Artificial Sequence
  Description of Artificial Sequence: Synthetic Peptide
  SITE (7)..(7): Xaa is C, F, I, N, or P
LKGQIDXI

SEQ ID NO: 1703 - protein, 8 aa, Artificial Sequence
  Description of Artificial Sequence: Synthetic Peptide
  SITE (7)..(7): Xaa is D, F, H, Q, V, or W
LKGQLDXI

SEQ ID NO: 1704 - protein, 8 aa, Artificial Sequence
  Description of Artificial Sequence: Synthetic Peptide
  SITE (7)..(7): Xaa is A, C, E, N, or W
LKGQIDXL

SEQ ID NO: 1705 - protein, 8 aa, Artificial Sequence
  Description of Artificial Sequence: Synthetic Peptide
  SITE (7)..(7): Xaa is C, H, W, or Y
LKGQLDXL

SEQ ID NO: 1706 - protein, 8 aa, Artificial Sequence
  Description of Artificial Sequence: Synthetic Peptide
  SITE (7)..(7): Xaa is C, E, F, G, I, L, M, N, P, R, T, V, or Y
LKGQIRXI

SEQ ID NO: 1707 - protein, 8 aa, Artificial Sequence
  Description of Artificial Sequence: Synthetic Peptide
  SITE (7)..(7): Xaa is C, D, E, H, I, P, V, or Y
LKGQLRXI

SEQ ID NO: 1708 - protein, 8 aa, Artificial Sequence
  Description of Artificial Sequence: Synthetic Peptide
  SITE (7)..(7): Xaa is C, D, F, H, I, M, P, R, V, or W
LKGQIRXL

SEQ ID NO: 1709 - protein, 8 aa, Artificial Sequence
  Description of Artificial Sequence: Synthetic Peptide
  SITE (7)..(7): Xaa is C, H, I, M, or W
LKGQLRXL

SEQ ID NO: 1710 - protein, 8 aa, Artificial Sequence
  Description of Artificial Sequence: Synthetic Peptide
  SITE (7)..(7): Xaa is C, H, I, K, M, P, Q, R, W, or Y
LKGQISXI

SEQ ID NO: 1711 - protein, 8 aa, Artificial Sequence
  Description of Artificial Sequence: Synthetic Peptide
  SITE (7)..(7): Xaa is C, D, E, F, M, R, V, or W
LKGQLSXI

SEQ ID NO: 1712 - protein, 8 aa, Artificial Sequence
  Description of Artificial Sequence: Synthetic Peptide
  SITE (7)..(7): Xaa is A, C, H, K, M, N, P, or W
LKGQISXL

SEQ ID NO: 1713 - protein, 8 aa, Artificial Sequence
  Description of Artificial Sequence: Synthetic Peptide
  SITE (7)..(7): Xaa is M, or W
LKGQLSXL

SEQ ID NO: 1714 - protein, 8 aa, Artificial Sequence
  Description of Artificial Sequence: Synthetic Peptide
  SITE (7)..(7): Xaa is C, D, H, M, P, V, W, or Y
LKGSIDXI

SEQ ID NO: 1715 - protein, 8 aa, Artificial Sequence
  Description of Artificial Sequence: Synthetic Peptide
  SITE (7)..(7): Xaa is Q, W, or Y
LKGSLDXI

SEQ ID NO: 1716 - protein, 8 aa, Artificial Sequence
  Description of Artificial Sequence: Synthetic Peptide
  SITE (7)..(7): Xaa is C, H, M, N, or W
LKGSIDXL

SEQ ID NO: 1717 - protein, 8 aa, Artificial Sequence
  Description of Artificial Sequence: Synthetic Peptide
  SITE (7)..(7): Xaa is H, K, P, Q, or V
LKGSLDXL

SEQ ID NO: 1718 - protein, 8 aa, Artificial Sequence
  Description of Artificial Sequence: Synthetic Peptide
  SITE (7)..(7): Xaa is A, E, G, Q, R, T, W, or Y
LKGSIRXI

SEQ ID NO: 1719 - protein, 8 aa, Artificial Sequence
  Description of Artificial Sequence: Synthetic Peptide
  SITE (7)..(7): Xaa is A, C, D, H, I, L, N, Q, R, T, W, or Y
LKGSLRXI

SEQ ID NO: 1720 - protein, 8 aa, Artificial Sequence
  Description of Artificial Sequence: Synthetic Peptide
  SITE (7)..(7): Xaa is E, F, G, H, M, Q, S, V, or W
LKGSIRXL

SEQ ID NO: 1721 - protein, 8 aa, Artificial Sequence
  Description of Artificial Sequence: Synthetic Peptide
LKGSLRCL

SEQ ID NO: 1722 - protein, 8 aa, Artificial Sequence
  Description of Artificial Sequence: Synthetic Peptide
  SITE (7)..(7): Xaa is C, D, H, M, P, V, W, or Y
LKGSISXI

SEQ ID NO: 1723 - protein, 8 aa, Artificial Sequence
  Description of Artificial Sequence: Synthetic Peptide
  SITE (7)..(7): Xaa is C, D, F, H, I, M, or Y
LKGSLSXI

SEQ ID NO: 1724 - protein, 8 aa, Artificial Sequence
  Description of Artificial Sequence: Synthetic Peptide
  SITE (7)..(7): Xaa is A, E, F, G, H, K, M, Q, S, V, or W
LKGSISXL

SEQ ID NO: 1725 - protein, 8 aa, Artificial Sequence
  Description of Artificial Sequence: Synthetic Peptide
  SITE (7)..(7): Xaa is M, P, or R
LKGSLSXL

SEQ ID NO: 1726 - protein, 8 aa, Artificial Sequence
  Description of Artificial Sequence: Synthetic Peptide
  SITE (7)..(7): Xaa is C, E, F, H, I, M, N, P, V, or W
LKLDIDXI

SEQ ID NO: 1727 - protein, 8 aa, Artificial Sequence
  Description of Artificial Sequence: Synthetic Peptide
  SITE (7)..(7): Xaa is C, E, M, N, P, T, V, or W
LKLDLDXI

SEQ ID NO: 1728 - protein, 8 aa, Artificial Sequence
  Description of Artificial Sequence: Synthetic Peptide
  SITE (7)..(7): Xaa is F, Q, V, or W
LKLDIDXL

SEQ ID NO: 1729 - protein, 8 aa, Artificial Sequence
  Description of Artificial Sequence: Synthetic Peptide
  SITE (7)..(7): Xaa is C, M, V, or W
LKLDLDXL

SEQ ID NO: 1730 - protein, 8 aa, Artificial Sequence
  Description of Artificial Sequence: Synthetic Peptide
  SITE (7)..(7): Xaa is C, F, G, H, L, M, P, T, W, or Y
LKLDIRXI

SEQ ID NO: 1731 - protein, 8 aa, Artificial Sequence
  Description of Artificial Sequence: Synthetic Peptide
  SITE (7)..(7): Xaa is F, H, K, R, W, or Y
LKLDLRXI

SEQ ID NO: 1732 - protein, 8 aa, Artificial Sequence
  Description of Artificial Sequence: Synthetic Peptide
  SITE (7)..(7): Xaa is C, D, F, H, K, P, W, or Y
LKLDIRXL

SEQ ID NO: 1733 - protein, 8 aa, Artificial Sequence
  Description of Artificial Sequence: Synthetic Peptide
  SITE (7)..(7): Xaa is C, F, N, R, or W
LKLDLRXL

SEQ ID NO: 1734 - protein, 8 aa, Artificial Sequence
  Description of Artificial Sequence: Synthetic Peptide
  SITE (7)..(7): Xaa is C, E, H, I ,P, S ,v, W, or Y
LKLDISXI

SEQ ID NO: 1735 - protein, 8 aa, Artificial Sequence
  Description of Artificial Sequence: Synthetic Peptide
  SITE (7)..(7): Xaa is I, M, or V
LKLDLSXI

SEQ ID NO: 1736 - protein, 8 aa, Artificial Sequence
  Description of Artificial Sequence: Synthetic Peptide
  SITE (7)..(7): Xaa is C, H, I, L, M, or Y
LKLDISXL

SEQ ID NO: 1737 - protein, 8 aa, Artificial Sequence
  Description of Artificial Sequence: Synthetic Peptide
  SITE (7)..(7): Xaa is C or W
LKLDLSXL

SEQ ID NO: 1738 - protein, 8 aa, Artificial Sequence
  Description of Artificial Sequence: Synthetic Peptide
  SITE (7)..(7): Xaa is C, G, H, Q, T, or W
LKLELDXI

SEQ ID NO: 1739 - protein, 8 aa, Artificial Sequence
  Description of Artificial Sequence: Synthetic Peptide
  SITE (7)..(7): Xaa is C, H, M, P, W, or Y
LKLEIDXL

SEQ ID NO: 1740 - protein, 8 aa, Artificial Sequence
  Description of Artificial Sequence: Synthetic Peptide
  SITE (7)..(7): Xaa is C, M, P ,T or Y
LKLELDXL

SEQ ID NO: 1741 - protein, 8 aa, Artificial Sequence
  Description of Artificial Sequence: Synthetic Peptide
  SITE (7)..(7): Xaa is A, C, H, I, M, N, P, Q, R, V, or W
LKLEIRXI

SEQ ID NO: 1742 - protein, 8 aa, Artificial Sequence
  Description of Artificial Sequence: Synthetic Peptide
  SITE (7)..(7): Xaa is C, D, F ,H, L, M, Q, S, W, or Y
LKLELRXI

SEQ ID NO: 1743 - protein, 8 aa, Artificial Sequence
  Description of Artificial Sequence: Synthetic Peptide
  SITE (7)..(7): Xaa is A, C, F, I, L, M, P, Q, R, S, or W
LKLEIRXL

SEQ ID NO: 1744 - protein, 8 aa, Artificial Sequence
  Description of Artificial Sequence: Synthetic Peptide
  SITE (7)..(7): Xaa is C, F, H, I, M, T, W, or Y
LKLELRXL

SEQ ID NO: 1745 - protein, 8 aa, Artificial Sequence
  Description of Artificial Sequence: Synthetic Peptide
  SITE (7)..(7): Xaa is C, E, G, M, P, S, or T
LKLEISXI

SEQ ID NO: 1746 - protein, 8 aa, Artificial Sequence
  Description of Artificial Sequence: Synthetic Peptide
  SITE (7)..(7): Xaa is C, F, M, Q, R, or V
LKLELSXI

SEQ ID NO: 1747 - protein, 8 aa, Artificial Sequence
  Description of Artificial Sequence: Synthetic Peptide
  SITE (7)..(7): Xaa is A, F, I, T, W, or Y
LKLEISXL

SEQ ID NO: 1748 - protein, 8 aa, Artificial Sequence
  Description of Artificial Sequence: Synthetic Peptide
  SITE (7)..(7): Xaa is C, H, L, or W
LKLELSXL

SEQ ID NO: 1749 - protein, 8 aa, Artificial Sequence
  Description of Artificial Sequence: Synthetic Peptide
  SITE (7)..(7): Xaa is C, F, G, H, M, R, S, or W
LKLNIDXI

SEQ ID NO: 1750 - protein, 8 aa, Artificial Sequence
  Description of Artificial Sequence: Synthetic Peptide
  SITE (7)..(7): Xaa is C, H, I, L, M, P, V, or W
LKLNLDXI

SEQ ID NO: 1751 - protein, 8 aa, Artificial Sequence
  Description of Artificial Sequence: Synthetic Peptide
  SITE (7)..(7): Xaa is C, G, H, I, R, W, or Y
LKLNIDXL

SEQ ID NO: 1752 - protein, 8 aa, Artificial Sequence
  Description of Artificial Sequence: Synthetic Peptide
  SITE (7)..(7): Xaa is C, M, Q, or W
LKLNLDXL

SEQ ID NO: 1753 - protein, 8 aa, Artificial Sequence
  Description of Artificial Sequence: Synthetic Peptide
  SITE (7)..(7): Xaa is C, G, H, K ,L, M, P, W, or Y
LKLNIRXI

SEQ ID NO: 1754 - protein, 8 aa, Artificial Sequence
  Description of Artificial Sequence: Synthetic Peptide
  SITE (7)..(7): Xaa is A, C, F, G, H, K, L, Q, V, W, or Y
LKLNLRXI

SEQ ID NO: 1755 - protein, 8 aa, Artificial Sequence
  Description of Artificial Sequence: Synthetic Peptide
  SITE (7)..(7): Xaa is C, I, M, N, V, W, or Y
LKLNIRXL

SEQ ID NO: 1756 - protein, 8 aa, Artificial Sequence
  Description of Artificial Sequence: Synthetic Peptide
  SITE (7)..(7): Xaa is H, M, R, V, W, or Y
LKLNLRXL

SEQ ID NO: 1757 - protein, 8 aa, Artificial Sequence
  Description of Artificial Sequence: Synthetic Peptide
  SITE (7)..(7): Xaa is A, C, F, I, M, or Y
LKLNISXI

SEQ ID NO: 1758 - protein, 8 aa, Artificial Sequence
  Description of Artificial Sequence: Synthetic Peptide
  SITE (7)..(7): Xaa is A, C, D, I, M, Q, T, V, or W
LKLNLSXI

SEQ ID NO: 1759 - protein, 8 aa, Artificial Sequence
  Description of Artificial Sequence: Synthetic Peptide
  SITE (7)..(7): Xaa is A, C, G, H, K, N, W, or Y
LKLNISXL

SEQ ID NO: 1760 - protein, 8 aa, Artificial Sequence
  Description of Artificial Sequence: Synthetic Peptide
  SITE (7)..(7): Xaa is C, P, or Y
LKLNLSXL

SEQ ID NO: 1761 - protein, 8 aa, Artificial Sequence
  Description of Artificial Sequence: Synthetic Peptide
  SITE (7)..(7): Xaa is C, F, M, P, V, or W
LKLQLDXI

SEQ ID NO: 1762 - protein, 8 aa, Artificial Sequence
  Description of Artificial Sequence: Synthetic Peptide
  SITE (7)..(7): Xaa is A, C, H, M, P, T, V, or W
LKLQIDXL

SEQ ID NO: 1763 - protein, 8 aa, Artificial Sequence
  Description of Artificial Sequence: Synthetic Peptide
  SITE (7)..(7): Xaa is C, F, H, N, or W
LKLQLDXL

SEQ ID NO: 1764 - protein, 8 aa, Artificial Sequence
  Description of Artificial Sequence: Synthetic Peptide
  SITE (7)..(7): Xaa is C, D, E, F, H, I, K, L, M, P, R, S, T, W, or Y
LKLQIRXI

SEQ ID NO: 1765 - protein, 8 aa, Artificial Sequence
  Description of Artificial Sequence: Synthetic Peptide
  SITE (7)..(7): Xaa is C, F, G, H, K, M ,Q, V, W, or Y
LKLQLRXI

SEQ ID NO: 1766 - protein, 8 aa, Artificial Sequence
  Description of Artificial Sequence: Synthetic Peptide
  SITE (7)..(7): Xaa is C, F, G, H, M ,P, T, W, or Y
LKLQIRXL

SEQ ID NO: 1767 - protein, 8 aa, Artificial Sequence
  Description of Artificial Sequence: Synthetic Peptide
  SITE (7)..(7): Xaa is C, F, H ,L, M, N, S, W, or Y
LKLQLRXL

SEQ ID NO: 1768 - protein, 8 aa, Artificial Sequence
  Description of Artificial Sequence: Synthetic Peptide
  SITE (7)..(7): Xaa is A, C, D, E, F, H, L ,P, R, V, W, or Y
LKLQISXI

SEQ ID NO: 1769 - protein, 8 aa, Artificial Sequence
  Description of Artificial Sequence: Synthetic Peptide
  SITE (7)..(7): Xaa is C, G, H, I, M, V, W, or Y
LKLQLSXI

SEQ ID NO: 1770 - protein, 8 aa, Artificial Sequence
  Description of Artificial Sequence: Synthetic Peptide
  SITE (7)..(7): Xaa is A, C, F, H, I, R, T, or V
LKLQISXL

SEQ ID NO: 1771 - protein, 8 aa, Artificial Sequence
  Description of Artificial Sequence: Synthetic Peptide
  SITE (7)..(7): Xaa is C or W
LKLQLSXL

SEQ ID NO: 1772 - protein, 8 aa, Artificial Sequence
  Description of Artificial Sequence: Synthetic Peptide
  SITE (7)..(7): Xaa is C, I, L, M, Q, or W
LKLSIDXI

SEQ ID NO: 1773 - protein, 8 aa, Artificial Sequence
  Description of Artificial Sequence: Synthetic Peptide
  SITE (7)..(7): Xaa is C, H, I, L, M, P, or W
LKLSLDXI

SEQ ID NO: 1774 - protein, 8 aa, Artificial Sequence
  Description of Artificial Sequence: Synthetic Peptide
  SITE (7)..(7): Xaa is F, M, Q, T, or Y
LKLSIDXL

SEQ ID NO: 1775 - protein, 8 aa, Artificial Sequence
  Description of Artificial Sequence: Synthetic Peptide
  SITE (7)..(7): Xaa is C, H, or W
LKLSLDXL

SEQ ID NO: 1776 - protein, 8 aa, Artificial Sequence
  Description of Artificial Sequence: Synthetic Peptide
  SITE (7)..(7): Xaa is A, C, F, H, K, L, N, P, T, V, or Y
LKLSIRXI

SEQ ID NO: 1777 - protein, 8 aa, Artificial Sequence
  Description of Artificial Sequence: Synthetic Peptide
  SITE (7)..(7): Xaa is A, C, F, G, I, K, L, M, P, V, or W
LKLSLRXI

SEQ ID NO: 1778 - protein, 8 aa, Artificial Sequence
  Description of Artificial Sequence: Synthetic Peptide
  SITE (7)..(7): Xaa is A, C, F, G, H, I, M, P, W, or Y
LKLSIRXL

SEQ ID NO: 1779 - protein, 8 aa, Artificial Sequence
  Description of Artificial Sequence: Synthetic Peptide
  SITE (7)..(7): Xaa is R, S, or W
LKLSLRXL

SEQ ID NO: 1780 - protein, 8 aa, Artificial Sequence
  Description of Artificial Sequence: Synthetic Peptide
  SITE (7)..(7): Xaa is A, C, G, H, K, R, W, or Y
LKLSISXI

SEQ ID NO: 1781 - protein, 8 aa, Artificial Sequence
  Description of Artificial Sequence: Synthetic Peptide
  SITE (7)..(7): Xaa is D, F, H, or Y
LKLSLSXI

SEQ ID NO: 1782 - protein, 8 aa, Artificial Sequence
  Description of Artificial Sequence: Synthetic Peptide
  SITE (7)..(7): Xaa is C or M
LKLSISXL

SEQ ID NO: 1783 - protein, 8 aa, Artificial Sequence
  Description of Artificial Sequence: Synthetic Peptide
  SITE (7)..(7): Xaa is F or T
LKLSLSXL

SEQ ID NO: 1784 - protein, 8 aa, Artificial Sequence
  Description of Artificial Sequence: Synthetic Peptide
  SITE (7)..(7): Xaa is C, D, H, M, S, V, or W
LKNDIDXI

SEQ ID NO: 1785 - protein, 8 aa, Artificial Sequence
  Description of Artificial Sequence: Synthetic Peptide
  SITE (7)..(7): Xaa is D, E, F, G, H, M, P, R, V, or W
LKNDLDXI

SEQ ID NO: 1786 - protein, 8 aa, Artificial Sequence
  Description of Artificial Sequence: Synthetic Peptide
  SITE (7)..(7): Xaa is C, F, H, M, R, or W
LKNDIDXL

SEQ ID NO: 1787 - protein, 8 aa, Artificial Sequence
  Description of Artificial Sequence: Synthetic Peptide
  SITE (7)..(7): Xaa is C, G, W, or Y
LKNDLDXL

SEQ ID NO: 1788 - protein, 8 aa, Artificial Sequence
  Description of Artificial Sequence: Synthetic Peptide
  SITE (7)..(7): Xaa is A, C, D, F, M, N, Q, T, W, or Y
LKNDIRXI

SEQ ID NO: 1789 - protein, 8 aa, Artificial Sequence
  Description of Artificial Sequence: Synthetic Peptide
  SITE (7)..(7): Xaa is A, C, D, E, F, G, M, P, Q, T, V, or Y
LKNDLRXI

SEQ ID NO: 1790 - protein, 8 aa, Artificial Sequence
  Description of Artificial Sequence: Synthetic Peptide
  SITE (7)..(7): Xaa is A, I, M, P, Q, T, V, or Y
LKNDIRXL

SEQ ID NO: 1791 - protein, 8 aa, Artificial Sequence
  Description of Artificial Sequence: Synthetic Peptide
  SITE (7)..(7): Xaa is C, D, E ,H, or T
LKNDLRXL

SEQ ID NO: 1792 - protein, 8 aa, Artificial Sequence
  Description of Artificial Sequence: Synthetic Peptide
  SITE (7)..(7): Xaa is A, C, E, F, H, M, P, or Q
LKNDISXI

SEQ ID NO: 1793 - protein, 8 aa, Artificial Sequence
  Description of Artificial Sequence: Synthetic Peptide
  SITE (7)..(7): Xaa is C, F, M, R, V, or W
LKNDLSXI

SEQ ID NO: 1794 - protein, 8 aa, Artificial Sequence
  Description of Artificial Sequence: Synthetic Peptide
  SITE (7)..(7): Xaa is C, I, M, P, Q, R, W, or Y
LKNDISXL

SEQ ID NO: 1795 - protein, 8 aa, Artificial Sequence
  Description of Artificial Sequence: Synthetic Peptide
  SITE (7)..(7): Xaa is C or H
LKNDLSXL

SEQ ID NO: 1796 - protein, 8 aa, Artificial Sequence
  Description of Artificial Sequence: Synthetic Peptide
  SITE (7)..(7): Xaa is M or P
LKNEIDXI

SEQ ID NO: 1797 - protein, 8 aa, Artificial Sequence
  Description of Artificial Sequence: Synthetic Peptide
  SITE (7)..(7): Xaa is A, C, F, G, H, M, or Q
LKNELDXI

SEQ ID NO: 1798 - protein, 8 aa, Artificial Sequence
  Description of Artificial Sequence: Synthetic Peptide
  SITE (7)..(7): Xaa is A, C, M, or P
LKNEIDXL

SEQ ID NO: 1799 - protein, 8 aa, Artificial Sequence
  Description of Artificial Sequence: Synthetic Peptide
  SITE (7)..(7): Xaa is C, F, P, W, or Y
LKNELRXI

SEQ ID NO: 1800 - protein, 8 aa, Artificial Sequence
  Description of Artificial Sequence: Synthetic Peptide
  SITE (7)..(7): Xaa is C, F, M, P, or W
LKNEIRXL

SEQ ID NO: 1801 - protein, 8 aa, Artificial Sequence
  Description of Artificial Sequence: Synthetic Peptide
  SITE (7)..(7): Xaa is C, M, P, Q, W, or Y
LKNELRXL

SEQ ID NO: 1802 - protein, 8 aa, Artificial Sequence
  Description of Artificial Sequence: Synthetic Peptide
  SITE (7)..(7): Xaa is C, H, M, P, or W
LKNEISXI

SEQ ID NO: 1803 - protein, 8 aa, Artificial Sequence
  Description of Artificial Sequence: Synthetic Peptide
  SITE (7)..(7): Xaa is C, I, M, N, W, or Y
LKNELSXI

SEQ ID NO: 1804 - protein, 8 aa, Artificial Sequence
  Description of Artificial Sequence: Synthetic Peptide
  SITE (7)..(7): Xaa is C, M, W, or Y
LKNEISXL

SEQ ID NO: 1805 - protein, 8 aa, Artificial Sequence
  Description of Artificial Sequence: Synthetic Peptide
LKNELSML

SEQ ID NO: 1806 - protein, 8 aa, Artificial Sequence
  Description of Artificial Sequence: Synthetic Peptide
  SITE (7)..(7): Xaa is C, H, M, P, R, C, W, or Y
LKNNIDXI

SEQ ID NO: 1807 - protein, 8 aa, Artificial Sequence
  Description of Artificial Sequence: Synthetic Peptide
  SITE (7)..(7): Xaa is C, G, M, P, Q, or W
LKNNLDXI

SEQ ID NO: 1808 - protein, 8 aa, Artificial Sequence
  Description of Artificial Sequence: Synthetic Peptide
  SITE (7)..(7): Xaa is F, G, M, N, P, Q, or W
LKNNLDXL

SEQ ID NO: 1809 - protein, 8 aa, Artificial Sequence
  Description of Artificial Sequence: Synthetic Peptide
  SITE (7)..(7): Xaa is C, G, H, L, M, N, P, Q, T, or W
LKNNIRXI

SEQ ID NO: 1810 - protein, 8 aa, Artificial Sequence
  Description of Artificial Sequence: Synthetic Peptide
  SITE (7)..(7): Xaa is C, E, H, K, M, N, T, W, or Y
LKNNLRXI

SEQ ID NO: 1811 - protein, 8 aa, Artificial Sequence
  Description of Artificial Sequence: Synthetic Peptide
  SITE (7)..(7): Xaa is C, D, F, G, I, K, M, R, or W
LKNNIRXL

SEQ ID NO: 1812 - protein, 8 aa, Artificial Sequence
  Description of Artificial Sequence: Synthetic Peptide
  SITE (7)..(7): Xaa is C, F, H, K, M, R, W, or Y
LKNNLRXL

SEQ ID NO: 1813 - protein, 8 aa, Artificial Sequence
  Description of Artificial Sequence: Synthetic Peptide
  SITE (7)..(7): Xaa is C, D, H, P Q, S, T, or W
LKNNISXI

SEQ ID NO: 1814 - protein, 8 aa, Artificial Sequence
  Description of Artificial Sequence: Synthetic Peptide
  SITE (7)..(7): Xaa is C, D, H, M, P, or W
LKNNLSXI

SEQ ID NO: 1815 - protein, 8 aa, Artificial Sequence
  Description of Artificial Sequence: Synthetic Peptide
  SITE (7)..(7): Xaa is C, M, or R
LKNNISXL

SEQ ID NO: 1816 - protein, 8 aa, Artificial Sequence
  Description of Artificial Sequence: Synthetic Peptide
  SITE (7)..(7): Xaa is C, H, or W
LKNNLSXL

SEQ ID NO: 1817 - protein, 8 aa, Artificial Sequence
  Description of Artificial Sequence: Synthetic Peptide
  SITE (7)..(7): Xaa is I, M, P, or T
LKNQIDXI

SEQ ID NO: 1818 - protein, 8 aa, Artificial Sequence
  Description of Artificial Sequence: Synthetic Peptide
  SITE (7)..(7): Xaa is C, H, M, P, or V
LKNQIDXL

SEQ ID NO: 1819 - protein, 8 aa, Artificial Sequence
  Description of Artificial Sequence: Synthetic Peptide
  SITE (7)..(7): Xaa is C, F, P, R, or W
LKNQLDXL

SEQ ID NO: 1820 - protein, 8 aa, Artificial Sequence
  Description of Artificial Sequence: Synthetic Peptide
  SITE (7)..(7): Xaa is A, C ,D, F, H, I, L, M, N, P, T, V, W, or Y
LKNQIRXI

SEQ ID NO: 1821 - protein, 8 aa, Artificial Sequence
  Description of Artificial Sequence: Synthetic Peptide
  SITE (7)..(7): Xaa is C, E, F, G, H, R, S, T, W, or Y
LKNQLRXI

SEQ ID NO: 1822 - protein, 8 aa, Artificial Sequence
  Description of Artificial Sequence: Synthetic Peptide
  SITE (7)..(7): Xaa is C, D, F, G, M, P, or W
LKNQIRXL

SEQ ID NO: 1823 - protein, 8 aa, Artificial Sequence
  Description of Artificial Sequence: Synthetic Peptide
  SITE (7)..(7): Xaa is A, C, P, T, V, W, or Y
LKNQLRXL

SEQ ID NO: 1824 - protein, 8 aa, Artificial Sequence
  Description of Artificial Sequence: Synthetic Peptide
  SITE (7)..(7): Xaa is A, C, G, H, M, or S
LKNQISXI

SEQ ID NO: 1825 - protein, 8 aa, Artificial Sequence
  Description of Artificial Sequence: Synthetic Peptide
  SITE (7)..(7): Xaa is C, F, M, P, R, W, or Y
LKNQLSXI

SEQ ID NO: 1826 - protein, 8 aa, Artificial Sequence
  Description of Artificial Sequence: Synthetic Peptide
  SITE (7)..(7): Xaa is C, M, P, or Y
LKNQISXL

SEQ ID NO: 1827 - protein, 8 aa, Artificial Sequence
  Description of Artificial Sequence: Synthetic Peptide
  SITE (7)..(7): Xaa is C, H, P, W, or Y
LKNQLSXL

SEQ ID NO: 1828 - protein, 8 aa, Artificial Sequence
  Description of Artificial Sequence: Synthetic Peptide
  SITE (7)..(7): Xaa is C, H, or Q
LKNSIDXI

SEQ ID NO: 1829 - protein, 8 aa, Artificial Sequence
  Description of Artificial Sequence: Synthetic Peptide
  SITE (7)..(7): Xaa is C, G, H, M, or V
LKNSIDXL

SEQ ID NO: 1830 - protein, 8 aa, Artificial Sequence
  Description of Artificial Sequence: Synthetic Peptide
  SITE (7)..(7): Xaa is C, M, or Q
LKNSLDXL

SEQ ID NO: 1831 - protein, 8 aa, Artificial Sequence
  Description of Artificial Sequence: Synthetic Peptide
  SITE (7)..(7): Xaa is A, E, F, G, H, I, M, P, or W
LKNSIRXI

SEQ ID NO: 1832 - protein, 8 aa, Artificial Sequence
  Description of Artificial Sequence: Synthetic Peptide
  SITE (7)..(7): Xaa is C, I, M, P, or W
LKNSLRXI

SEQ ID NO: 1833 - protein, 8 aa, Artificial Sequence
  Description of Artificial Sequence: Synthetic Peptide
  SITE (7)..(7): Xaa is G, H, K, P, R, W, or Y
LKNSIRXL

SEQ ID NO: 1834 - protein, 8 aa, Artificial Sequence
  Description of Artificial Sequence: Synthetic Peptide
LKNSLRCL

SEQ ID NO: 1835 - protein, 8 aa, Artificial Sequence
  Description of Artificial Sequence: Synthetic Peptide
  misc_feature (7)..(7): Xaa can be any naturally occurring amino acid
LKNSISXI

SEQ ID NO: 1836 - protein, 8 aa, Artificial Sequence
  Description of Artificial Sequence: Synthetic Peptide
  SITE (7)..(7): Xaa is C, M, W, or Y
LKNSLSXI

SEQ ID NO: 1837 - protein, 8 aa, Artificial Sequence
  Description of Artificial Sequence: Synthetic Peptide
  SITE (7)..(7): Xaa is C or H
LKNSLSXL

SEQ ID NO: 1838 - protein, 8 aa, Artificial Sequence
  Description of Artificial Sequence: Synthetic Peptide
  SITE (7)..(7): Xaa is C, H, P, R, T, or W
LKSDIDXI

SEQ ID NO: 1839 - protein, 8 aa, Artificial Sequence
  Description of Artificial Sequence: Synthetic Peptide
  SITE (7)..(7): Xaa is A, D, H, or W
LKSDLDXI

SEQ ID NO: 1840 - protein, 8 aa, Artificial Sequence
  Description of Artificial Sequence: Synthetic Peptide
  SITE (7)..(7): Xaa is C, F, P, Q, or W
LKSDIDXL

SEQ ID NO: 1841 - protein, 8 aa, Artificial Sequence
  Description of Artificial Sequence: Synthetic Peptide
  SITE (7)..(7): Xaa is C, F, P, R, or Y
LKSDLDXL

SEQ ID NO: 1842 - protein, 8 aa, Artificial Sequence
  Description of Artificial Sequence: Synthetic Peptide
  SITE (7)..(7): Xaa is A, F, G, N, P, Q, R, S, V, W, or Y
LKSDIRXI

SEQ ID NO: 1843 - protein, 8 aa, Artificial Sequence
  Description of Artificial Sequence: Synthetic Peptide
  SITE (7)..(7): Xaa is C, D, F, H, I, M, N, Q, or W
LKSDLRXI

SEQ ID NO: 1844 - protein, 8 aa, Artificial Sequence
  Description of Artificial Sequence: Synthetic Peptide
  SITE (7)..(7): Xaa is C, H, L, P, Q, W, or Y
LKSDIRXL

SEQ ID NO: 1845 - protein, 8 aa, Artificial Sequence
  Description of Artificial Sequence: Synthetic Peptide
  SITE (7)..(7): Xaa is L, M, P, or W
LKSDLRXL

SEQ ID NO: 1846 - protein, 8 aa, Artificial Sequence
  Description of Artificial Sequence: Synthetic Peptide
  SITE (7)..(7): Xaa is C, D, H, I, M, P, T, or W
LKSDISXI

SEQ ID NO: 1847 - protein, 8 aa, Artificial Sequence
  Description of Artificial Sequence: Synthetic Peptide
  SITE (7)..(7): Xaa is C, F, I, M, or P
LKSDLSXI

SEQ ID NO: 1848 - protein, 8 aa, Artificial Sequence
  Description of Artificial Sequence: Synthetic Peptide
  SITE (7)..(7): Xaa is C, F, H, M, P, W, or Y
LKSDISXL

SEQ ID NO: 1849 - protein, 8 aa, Artificial Sequence
  Description of Artificial Sequence: Synthetic Peptide
  SITE (7)..(7): Xaa is C, M, or Y
LKSDLSXL

SEQ ID NO: 1850 - protein, 8 aa, Artificial Sequence
  Description of Artificial Sequence: Synthetic Peptide
  SITE (7)..(7): Xaa is C, F, M, V, or W
LKSEIDXI

SEQ ID NO: 1851 - protein, 8 aa, Artificial Sequence
  Description of Artificial Sequence: Synthetic Peptide
  SITE (7)..(7): Xaa is P, T, W, or Y
LKSELDXI

SEQ ID NO: 1852 - protein, 8 aa, Artificial Sequence
  Description of Artificial Sequence: Synthetic Peptide
  SITE (7)..(7): Xaa is C, or W
LKSEIDXL

SEQ ID NO: 1853 - protein, 8 aa, Artificial Sequence
  Description of Artificial Sequence: Synthetic Peptide
LKSELDCL

SEQ ID NO: 1854 - protein, 8 aa, Artificial Sequence
  Description of Artificial Sequence: Synthetic Peptide
  SITE (7)..(7): Xaa is A, C, D, F, H, I, L, M, P, W, or Y
LKSEIRXI

SEQ ID NO: 1855 - protein, 8 aa, Artificial Sequence
  Description of Artificial Sequence: Synthetic Peptide
  SITE (7)..(7): Xaa is A, C, F, I, M, N, V, or W
LKSELRXI

SEQ ID NO: 1856 - protein, 8 aa, Artificial Sequence
  Description of Artificial Sequence: Synthetic Peptide
  SITE (7)..(7): Xaa is F, L, M, P, W, or Y
LKSEIRXL

SEQ ID NO: 1857 - protein, 8 aa, Artificial Sequence
  Description of Artificial Sequence: Synthetic Peptide
  SITE (7)..(7): Xaa is C, H, N, W, or Y
LKSELRXL

SEQ ID NO: 1858 - protein, 8 aa, Artificial Sequence
  Description of Artificial Sequence: Synthetic Peptide
  SITE (7)..(7): Xaa is A, C, F, H, I, L, M, or T
LKSEISXI

SEQ ID NO: 1859 - protein, 8 aa, Artificial Sequence
  Description of Artificial Sequence: Synthetic Peptide
  SITE (7)..(7): Xaa is C, D, M, Q, W, or Y
LKSELSXI

SEQ ID NO: 1860 - protein, 8 aa, Artificial Sequence
  Description of Artificial Sequence: Synthetic Peptide
  SITE (7)..(7): Xaa is C, P, or W
LKSEISXL

SEQ ID NO: 1861 - protein, 8 aa, Artificial Sequence
  Description of Artificial Sequence: Synthetic Peptide
  SITE (7)..(7): Xaa is C, or M
LKSELSXL

SEQ ID NO: 1862 - protein, 8 aa, Artificial Sequence
  Description of Artificial Sequence: Synthetic Peptide
  SITE (7)..(7): Xaa is C, E, G, H, M, P, Q, W, or Y
LKSNIDXI

SEQ ID NO: 1863 - protein, 8 aa, Artificial Sequence
  Description of Artificial Sequence: Synthetic Peptide
  SITE (7)..(7): Xaa is F, G, H, Q, T, or W
LKSNLDXI

SEQ ID NO: 1864 - protein, 8 aa, Artificial Sequence
  Description of Artificial Sequence: Synthetic Peptide
  SITE (7)..(7): Xaa is C, I, P, Q, R, or W
LKSNIDXL

SEQ ID NO: 1865 - protein, 8 aa, Artificial Sequence
  Description of Artificial Sequence: Synthetic Peptide
  SITE (7)..(7): Xaa is H, I, or W
LKSNLDXL

SEQ ID NO: 1866 - protein, 8 aa, Artificial Sequence
  Description of Artificial Sequence: Synthetic Peptide
  SITE (7)..(7): Xaa is C, H, P, T, or Y
LKSNISXI

SEQ ID NO: 1867 - protein, 8 aa, Artificial Sequence
  Description of Artificial Sequence: Synthetic Peptide
  SITE (7)..(7): Xaa is H, or Q
LKSNLSXI

SEQ ID NO: 1868 - protein, 8 aa, Artificial Sequence
  Description of Artificial Sequence: Synthetic Peptide
  SITE (7)..(7): Xaa is C, E, F, H, L, M, N, T, V, or W
LKSNISXL

SEQ ID NO: 1869 - protein, 8 aa, Artificial Sequence
  Description of Artificial Sequence: Synthetic Peptide
  SITE (7)..(7): Xaa is C, or G
LKSNLSXL

SEQ ID NO: 1870 - protein, 8 aa, Artificial Sequence
  Description of Artificial Sequence: Synthetic Peptide
  SITE (7)..(7): Xaa is C, F, G, H, I, M, P, or V
LKSQIDXI

SEQ ID NO: 1871 - protein, 8 aa, Artificial Sequence
  Description of Artificial Sequence: Synthetic Peptide
  SITE (7)..(7): Xaa is C, P, V, or Y
LKSQLDXI

SEQ ID NO: 1872 - protein, 8 aa, Artificial Sequence
  Description of Artificial Sequence: Synthetic Peptide
  SITE (7)..(7): Xaa is C, I, P, or W
LKSQIDXL

SEQ ID NO: 1873 - protein, 8 aa, Artificial Sequence
  Description of Artificial Sequence: Synthetic Peptide
  SITE (7)..(7): Xaa is C, F, M, P, W, or Y
LKSQLDXL

SEQ ID NO: 1874 - protein, 8 aa, Artificial Sequence
  Description of Artificial Sequence: Synthetic Peptide
  SITE (7)..(7): Xaa is C, H, L, M, N, Q, T, W, or Y
LKSQIRXI

SEQ ID NO: 1875 - protein, 8 aa, Artificial Sequence
  Description of Artificial Sequence: Synthetic Peptide
  SITE (7)..(7): Xaa is F, I, M, S, W, or Y
LKSQLRXI

SEQ ID NO: 1876 - protein, 8 aa, Artificial Sequence
  Description of Artificial Sequence: Synthetic Peptide
  SITE (7)..(7): Xaa is C, G, H, M, W, or Y
LKSQIRXL

SEQ ID NO: 1877 - protein, 8 aa, Artificial Sequence
  Description of Artificial Sequence: Synthetic Peptide
  SITE (7)..(7): Xaa is C, F, H, M, P, V, or W
LKSQLRXL

SEQ ID NO: 1878 - protein, 8 aa, Artificial Sequence
  Description of Artificial Sequence: Synthetic Peptide
  SITE (7)..(7): Xaa is C, H, I, M, W, or Y
LKSQISXI

SEQ ID NO: 1879 - protein, 8 aa, Artificial Sequence
  Description of Artificial Sequence: Synthetic Peptide
  SITE (7)..(7): Xaa is C, G, I, M, P, T, or W
LKSQLSXI

SEQ ID NO: 1880 - protein, 8 aa, Artificial Sequence
  Description of Artificial Sequence: Synthetic Peptide
  SITE (7)..(7): Xaa is C, H, M, or W
LKSQISXL

SEQ ID NO: 1881 - protein, 8 aa, Artificial Sequence
  Description of Artificial Sequence: Synthetic Peptide
  SITE (7)..(7): Xaa is C, H, I, M, W, or Y
LKSQLSXL

SEQ ID NO: 1882 - protein, 8 aa, Artificial Sequence
  Description of Artificial Sequence: Synthetic Peptide
  SITE (7)..(7): Xaa is C, F, H, or R
LKSSIDXI

SEQ ID NO: 1883 - protein, 8 aa, Artificial Sequence
  Description of Artificial Sequence: Synthetic Peptide
  SITE (7)..(7): Xaa is C, F, P, V, or Y
LKSSLDXI

SEQ ID NO: 1884 - protein, 8 aa, Artificial Sequence
  Description of Artificial Sequence: Synthetic Peptide
  SITE (7)..(7): Xaa is C, F, or W
LKSSIDXL

SEQ ID NO: 1885 - protein, 8 aa, Artificial Sequence
  Description of Artificial Sequence: Synthetic Peptide
  SITE (7)..(7): Xaa is C, M, or Y
LKSSLDXL

SEQ ID NO: 1886 - protein, 8 aa, Artificial Sequence
  Description of Artificial Sequence: Synthetic Peptide
  SITE (7)..(7): Xaa is C, E, G, H, I, M, N, P, R, W, or Y
LKSSIRXI

SEQ ID NO: 1887 - protein, 8 aa, Artificial Sequence
  Description of Artificial Sequence: Synthetic Peptide
  SITE (7)..(7): Xaa is A, C, K, L, M, P, V, or Y
LKSSLRXI

SEQ ID NO: 1888 - protein, 8 aa, Artificial Sequence
  Description of Artificial Sequence: Synthetic Peptide
  SITE (7)..(7): Xaa is I, M, P, or W
LKSSIRXL

SEQ ID NO: 1889 - protein, 8 aa, Artificial Sequence
  Description of Artificial Sequence: Synthetic Peptide
  SITE (7)..(7): Xaa is C, H, or Y
LKSSLRXL

SEQ ID NO: 1890 - protein, 8 aa, Artificial Sequence
  Description of Artificial Sequence: Synthetic Peptide
  SITE (7)..(7): Xaa is A, C, F, M, W, or Y
LKSSISXI

SEQ ID NO: 1891 - protein, 8 aa, Artificial Sequence
  Description of Artificial Sequence: Synthetic Peptide
  SITE (7)..(7): Xaa is C, M, W, or Y
LKSSLSXI

SEQ ID NO: 1892 - protein, 8 aa, Artificial Sequence
  Description of Artificial Sequence: Synthetic Peptide
  SITE (7)..(7): Xaa is M, or W
LKSSISXL

SEQ ID NO: 1893 - protein, 8 aa, Artificial Sequence
  Description of Artificial Sequence: Synthetic Peptide
  SITE (7)..(7): Xaa is C, or W
LKSSLSXL

SEQ ID NO: 1894 - protein, 8 aa, Artificial Sequence
  Description of Artificial Sequence: Synthetic Peptide
FKGQLRAI

SEQ ID NO: 1895 - protein, 8 aa, Artificial Sequence
  Description of Artificial Sequence: Synthetic Peptide
FKGQLRDI

SEQ ID NO: 1896 - protein, 8 aa, Artificial Sequence
  Description of Artificial Sequence: Synthetic Peptide
FKGQLRFI

SEQ ID NO: 1897 - protein, 8 aa, Artificial Sequence
  Description of Artificial Sequence: Synthetic Peptide
FKGQLRII

SEQ ID NO: 1898 - protein, 8 aa, Artificial Sequence
  Description of Artificial Sequence: Synthetic Peptide
FKGQLRKI

SEQ ID NO: 1899 - protein, 8 aa, Artificial Sequence
  Description of Artificial Sequence: Synthetic Peptide
FKGQLRMI

SEQ ID NO: 1900 - protein, 8 aa, Artificial Sequence
  Description of Artificial Sequence: Synthetic Peptide
FKGQLRNI

SEQ ID NO: 1901 - protein, 8 aa, Artificial Sequence
  Description of Artificial Sequence: Synthetic Peptide
FKGQLRPI

SEQ ID NO: 1902 - protein, 8 aa, Artificial Sequence
  Description of Artificial Sequence: Synthetic Peptide
FKGQLRQI

SEQ ID NO: 1903 - protein, 8 aa, Artificial Sequence
  Description of Artificial Sequence: Synthetic Peptide
FKGQLRRI

SEQ ID NO: 1904 - protein, 8 aa, Artificial Sequence
  Description of Artificial Sequence: Synthetic Peptide
FKGQLRSI

SEQ ID NO: 1905 - protein, 8 aa, Artificial Sequence
  Description of Artificial Sequence: Synthetic Peptide
FKGQLRTI

SEQ ID NO: 1906 - protein, 8 aa, Artificial Sequence
  Description of Artificial Sequence: Synthetic Peptide
FKGQLRWI

SEQ ID NO: 1907 - protein, 8 aa, Artificial Sequence
  Description of Artificial Sequence: Synthetic Peptide
FKGQLRYI

SEQ ID NO: 1908 - protein, 8 aa, Artificial Sequence
  Description of Artificial Sequence: Synthetic Peptide
LKGQLRCI

SEQ ID NO: 1909 - protein, 8 aa, Artificial Sequence
  Description of Artificial Sequence: Synthetic Peptide
LGGFLRCI

SEQ ID NO: 1910 - protein, 8 aa, Artificial Sequence
  Description of Artificial Sequence: Synthetic Peptide
LKLKLRQI

SEQ ID NO: 1911 - protein, 8 aa, Artificial Sequence
  Description of Artificial Sequence: Synthetic Peptide
  SITE (7)..(7): Xaa is A, D, F, I, K, M, N, P, Q, R, S, T, W, or Y
FKGQLRXI

SEQ ID NO: 1912 - protein, 8 aa, Artificial Sequence
  Description of Artificial Sequence: Synthetic Peptide
  SITE (7)..(7): Xaa is any amino acid
AKGQMRXL

SEQ ID NO: 1913 - protein, 8 aa, Artificial Sequence
  Description of Artificial Sequence: Synthetic Peptide
  SITE (7)..(7): Xaa is any amino acid
FGGQMRXI

SEQ ID NO: 1914 - protein, 8 aa, Artificial Sequence
  Description of Artificial Sequence: Synthetic Peptide
  SITE (7)..(7): Xaa is any amino acid
FGLQMRXI

SEQ ID NO: 1915 - protein, 8 aa, Artificial Sequence
  Description of Artificial Sequence: Synthetic Peptide
  SITE (7)..(7): Xaa is any amino acid
FKLQMRXL

SEQ ID NO: 1916 - protein, 8 aa, Artificial Sequence
  Description of Artificial Sequence: Synthetic Peptide
  SITE (7)..(7): Xaa is any amino acid
LKLHLRNM

What is claimed is:

1. An isolated or purified compound having anti-cell proliferative activity, wherein the compound consists of an 8 to about 45 amino acid residue sequence and wherein the 8 to about 45 amino acid residue sequence includes within the sequence a conserved motif: (Res1)-(Res 2)-(Res 3)-(Res 4)-(Res 5)-(Res 6)-(Res 7)-(Res 8) selected from A-K-G-Q-M-R-X-L (SEQ. ID NO:1912), wherein X is any amino acid; A-K-L-Q-L-R-X-I (SEQ. ID NO:583), wherein X is any amino acid; F-G-G-Q-M-R-X-I (SEQ. ID NO:1913), wherein X is any amino acid; F-K-L-Q-M-R-X-L (SEQ. ID NO:1915), wherein X is any amino acid; F-G-L-Q-L-M-R-X-I (SEQ. ID NO:1914), wherein X is any amino acid; L-K-G-Q-L-R-C-I (SEQ. ID NO:1908); L-G-G-F-L-R-C-I (SEQ. ID NO:1909); and L-K-L-H-L-R-N-M (SEQ. ID NO:1916).

2. The compound of claim 1, wherein the compound has less than about 25 amino acid residues.

3. The compound of claim 1, wherein the compound has less than about 20 amino acid residues.

4. The compound of claim 1, wherein the compound has between about 10 and 25 amino acid residues.

5. The compound of claim 1, wherein the compound has between about 10 and 20 amino acid residues.

6. The compound of claim 1, wherein the compound has between about 10 and 16 amino acid residues.

7. The compound of claim 1, wherein the compound comprises one or more L-amino acids, one or more D-amino acids, or one or more non-naturally occurring amino acids.

8. The compound of claim 1, wherein the compound has activity against a metastatic or non-metastatic cancer, tumor or neoplastic cell.

9. The compound of claim 1, wherein the compound is purified.

10. The compound of claim 1, further comprising a pharmaceutically acceptable carrier or excipient.

11. A transformed cell that expresses the compound of claim 1.

12. A method of treating a cell proliferative disorder in a subject in need of treatment, comprising administering to the subject the compound of claim 1 in an amount effective to treat the cell proliferative disorder.

13. The method of claim 12, wherein the cell proliferative disorder comprises a metastatic or non-metastatic neoplasia, tumor, cancer.

14. The method of claim 13, wherein the neoplasia, tumor, or cancer, or metastasis thereof affects or is present at least in part in brain, spine, head or neck, breast, esophagus, mouth, nasopharynx, nose or sinuses, thyroid, head or neck, gastrointestinal tract, stomach, small intestine, duodenum, ileum, jejunum, lung, liver, pancreas, kidney, adrenal gland, bladder, colon, rectum, genito-urinary tract, prostate, uterus, endometrium, cervix, ovary, bone marrow, lymph, blood, bone, testes, penis, skin or muscle, or hematopoetic system.

15. The method of claim 13, wherein the neoplasia, tumor, or cancer comprises a sarcoma, carcinoma, adenocarcinoma, osteosarcoma, fibrosarcoma, melanoma, myeloma, blastoma, glioma, lymphoma or leukemia.

16. The method of claim 13, wherein the neoplasia, tumor, or cancer comprises a stomach adenocarcinoma, colorectal cancer, ovarian carcinoma, lung cancer, breast or mammary cancer, gastric cancer, pancreatic cancer, gastrointestinal cancer, nervous tissue or brain tumor, esophageal cancer, urinary bladder cancer, prostate cancer, kidney cancer, ovarian cancer, testicular cancer, endometrial cancer, cervical cancer, uterine cancer, or Hodgkin's disease.

17. The method of claim 13, wherein the neoplasia, tumor, or cancer, or metastasis thereof, comprises a stage I, II, III, IV or V neoplasia, tumor, cancer, or metastasis.

18. The method of claim 13, wherein the neoplasia, tumor, or cancer, or metastasis thereof, is solid or liquid.

19. The method of claim 12, wherein the compound of claim 1 is administered to the subject locally, regionally, or systemically.

20. The method of claim 12, wherein the subject is a mammal.

21. The method of claim 20, wherein the subject is a human.

22. The compound of claim 1, wherein the compound consists of an 8 to about 30 amino acid residue sequence.
